(19) United States
(12) Patent Application Publication
(10) Pub. No.: US 2004/0259145 A1
(43) Pub. Date: Dec. 23, 2004

(54) Compositions and methods for the modification of gene expression

(76) Inventors: Marion Wood, Auckland (NZ); Michael A. Shenk, Palmerston North (NZ); Annette McGrath, St. Lucia (AU); Matthew Glenn, Palmerston North (NZ)

Correspondence Address: SPECKMAN LAW GROUP PLLC, 1501 WESTERN AVE, SEATTLE, WA, 98101, US

(21) Appl. No.: 10/856,499

(22) Filed: May 28, 2004

Related U.S. Application Data
(63) Continuation-in-part of application No. 09/640,211, filed on Aug. 16, 2000.
Application No. 09/640,211 is a continuation-in-part of application No. 09/266,513, filed on Mar. 11, 1999, now abandoned.
(60) Provisional application No. 60/149,485, filed on Aug. 18, 1999.

(30) Foreign Application Priority Data
Mar. 9, 2000 (WO) PCT/US00/06112

(51) Int. Cl. C12Q 1/68; A01K 67/00; C07H 21/04

(52) U.S. Cl. 435/6; 800/8; 435/69.1; 435/320.1; 435/325; 530/350; 536/23.2

(57) ABSTRACT

Novel isolated polynucleotides that encode plant transcription factors are provided, together with genetic constructs comprising such polynucleotides. Methods for using such constructs in modulating the expression of endogenous and/or heterologous genes are also disclosed, together with transgenic plants comprising such constructs.

### CROSS-REFERENCE TO RELATED APPLICATIONS

[0001] This application is a continuation-in-part of U.S. patent application Ser. No. 09/640,211 filed Aug. 16, 2000, which claims priority to International Patent Application No. PCT/US/00/06112, filed Mar. 9, 2000, and to U.S. Provisional Patent Application No. 60/149,485, filed Aug. 18, 1999, and is a continuation-in-part of U.S. patent application Ser. No. 09/266,513, filed Mar. 11, 1999, now abandoned.

### TECHNICAL FIELD OF THE INVENTION

[0002] This invention relates to compositions isolated from plants and their use in the modification of gene transcription and/or expression. More specifically, this invention relates to plant polynucleotide sequences encoding transcription factors that are components of the cellular transcription apparatus and the use of such polynucleotide sequences in the modification of gene expression.

### BACKGROUND OF THE INVENTION

[0003] Eucaryotic gene expression is regulated, in part, by the cellular processes involved in transcription. During transcription, a single-stranded RNA complementary to the DNA sequence to be transcribed is formed by the action of RNA polymerases. Initiation of transcription in eucaryotic cells is regulated by complex interactions between cis-acting DNA motifs, located upstream of the gene to be transcribed, and trans-acting protein factors. Among the cis-acting regulatory regions are sequences of DNA, termed promoters, which are located close to the transcription initiation site and to which RNA polymerase is first bound, either directly or indirectly. Promoters usually consist of proximal (e.g., TATA box) and more distant elements (e.g., CCAAT box). Enhancers are cis-acting DNA motifs which may be situated further up- and/or down-stream from the initiation site.

[0004] Both promoters and enhancers are generally composed of several discrete, often redundant, elements each of which may be recognized by one or more trans-acting regulatory proteins, known as transcription factors. Regulation of the complex patterns of gene expression observed both spatially and temporally, in all developing organisms, is thought to arise from the interaction of enhancer- and promoter-bound, general and tissue-specific transcription factors with DNA (Izawa T, Foster R and Chua N H, J. Mol. Biol. 230:1131-1144, 1993; Menkens A E, Schindler U and Cashmore A R, Trends in Biochem. Sci. 13:506-510, 1995). Developmental decisions in organisms as diverse as Drosophila melanogaster, Saccharomyces cerevisiae, Arabidopsis thaliana and Pinus radiata are regulated by transcription factors. These DNA-binding regulatory molecules have been shown to control the expression of genes responsible for the differentiation of different cell types, for example, the differentiation of leaf trichomes and xylem tissue in Arabidopsis thaliana, formation of endoderm from embryonic cells in Xenopus laevis and the initiation of gene expression in response to environmental and phytohormonal stress in plants (Yanagisawa S and Sheen J, The Plant Cell 10:75-89, 1998).

[0005] Transcription factors generally bind DNA in a sequence-specific manner and either activate or repress transcription initiation. The specific mechanisms of these interactions remain to be fully elucidated. At least three separate domains have been identified within transcription factors. One is essential for sequence-specific DNA recognition, one for the activation/repression of transcriptional initiation, and one for the formation of protein-protein interactions (such as dimerization). Four motifs, or domains, involved in DNA sequence recognition and/or transcription factor dimerization have been identified to date: zinc fingers; helix-turn-helix; leucine zipper; and helix-loop-helix. Both helix-loop-helix and leucine zipper protein motifs have been implicated in the binding of transcription factors to DNA via their ability to readily form homo- or hetero-dimers in vivo. “Activating” domains are rich in either proline, glutamine or acidic amino acids. It has been proposed that this net negative region of the transcription factor interacts with the TATA box-binding transcription factor TFIID, RNA polymerase, and/or another protein associated with the transcription apparatus.

[0006] Studies indicate that many plant transcription factors can be grouped into distinct classes based on their conserved DNA binding domains (Katagiri F and Chua N H, Trends Genet. 8:22-27, 1992; Menkens A E, Schindler U and Cashmore A R, Trends in Biochem. Sci. 13:506-510, 1995; Martin C and Paz-Ares J, Trends Genet. 13:67-73, 1997). Each member of these families interacts and binds with distinct DNA sequence motifs that are often found in multiple gene promoters controlled by different regulatory signals. Several classes of transcription factors that have been identified to date are described below.

[0007] The basic/leucine zipper (bZIP) is a conserved family of transcription factors defined by a basic/leucine zipper (bZIP) motif (Landschultz et al., Science 240:1759-1764, 1988; McKnight, Sci. Am.. 264:54-64,1991; Foster et al., FASEB J. [2]:192-200, 1994). Transcriptional regulation of gene expression is mediated by both the bZIPs and other families of transcription factors, through the concerted action of sequence-specific transcription factors that interact with regulatory elements residing in the promoter regions of the corresponding gene. The bZIP bipartite DNA binding structure consists of a region enriched in basic amino acids (basic region) adjacent to a leucine zipper that is characterized by several leucine residues regularly spaced at seven amino acid intervals (Vinson et al., Science 246:911-916, 1989). Whereas the basic region directly contacts the DNA, the leucine zipper mediates homodimerisation and heterodimerisation of protein monomers through a parallel interaction of the hydrophobic dimerization interfaces of two α-helices, resulting in a coiled-coil structure (O'Shea et al., Science 243:538-542, 1989; Science 254:539-544, 1991; Hu et al., Science 250:1400-1403,1990; Rasmussen et al., Proc. Natl. Acad. Sci. USA 88:561-564, 1991).

[0008] Dof proteins are a relatively new class of transcription factor and are thought to mediate the regulation of some patterns of plant gene expression in part by combinatorial interactions between bZIP proteins and other types of transcription factors binding to closely linked sites. Such an example of this combinatorial interaction has been observed between bZIP and Dof transcription factors (Singh, Plant Physiol. 118:1111-1120, 1998). These Dof proteins possess a single zinc-finger DNA binding domain that is highly conserved in plants (Yanagisawa, Trends Plant Sci. 1:213, 1996). Specific binding of the Dof protein to bZIP transcription factors has been demonstrated and it has been proposed that this specific interaction results in the stimulation of bZIP binding to DNA target sequences in plant promoters (Chen et al., Plant J. 10:955-966, 1996). Examples of such Dof/bZIP interactions have been reported in the literature, including for example, the Arabidopsis thaliana glutathionine S-transferase-6 gene (GST6) promoter which has been shown to contain several Dof-binding sites closely linked to the ocs element, a recognized bZIP binding site (Singh, Plant Physiol. 118:1111-1120, 1998).

[0009] The bZIP family of G-box binding factors from Arabidopsis (including GBF1, GBF2 and GBF3, for example) interact with the palindromic G-box motif (CCACGTGG). However, it has been demonstrated that the DNA binding specificity of such transcription factors, for example GBF1, may be influenced by the nature of the nucleotides flanking the ACGT core (Schindler et al., EMBO J. 11:1274-1289, 1992a). In vivo transient and transgenic plant expression studies have shown that these ACGT elements are necessary for maximal transcriptional activation and have been identified in a multitude of plant genes regulated by diverse environmental, physiological, and environmental cues. Classification of these transcription factors based upon their ability to bind to the ACGT core motif yielded a relatively diverse group of proteins, including, for example the CamV 35S promoter as-1-binding protein which exhibits DNA binding site requirements distinct from those proteins interacting with the G-box (Tabata et al., EMBO J. 10:1459-1467, 1991). Thus, in addition to defining the individual classes of bZIP proteins on the basis of their DNA binding specificity, such proteins can also be classified according to their heterodimerisation characteristics (Cao et al., Genes Dev. 5:1538-1552, 1991; Schindler et al., EMBO J. 11:1261-1273, 1992b).

[0010] Environmentally inducible promoters require the presence of two cis-acting elements, critical for promoter activity, one of which is the moderately conserved G-box (CCACGTGG) (deVetten et al., Plant Cell 4[10]:1295-1307, 1992). A mutation in one of the two elements abolishes or severely reduces the ability of the promoter to respond to environmental changes. The sequence of the second cis-acting element, positioned near the G-box, is not conserved among different environmentally-inducible promoters, but may be similar among promoters induced by the same signal. The spacing between the G-box and the second cis-acting element appears to be critical, suggesting a direct interaction between the respective binding factors (deVetten and Ferl, Int. J. Biochem. 26[9]:1055-1068, 1994; Ramachandran et al., Curr. Opin. Genet. Dev. 4[5]:642-646, 1994).

[0011] Basic helix-loop-helix zipper proteins represent an additional class of bZIP transcription factors described in the literature and includes, for example, the Myc proteins. These proteins contain two regions characteristic of transcription factors: an N-terminal transactivation domain consisting of several phosphorylation sites, and a C-terminal basic helix-loop-helix (bHLH) leucine zipper motif known to mediate dimerization and sequence specific DNA binding via three distinct domains: the leucine zipper, helix-loop-helix, and basic regions.

[0012] The Myb family of transcription factors is a group of functionally diverse transcriptional activators found in both plants and animals that is characterized by a conserved amino-terminal DNA-binding domain containing either two (in plant species) or three (in animal species) imperfect tandem repeats of approximately 50 amino acids (Rosinski and Atchley, J. Mol. Evol. 46(1):74-83, 1998; Stober-Grasser et al., Oncogene 7[3]:589-596, 1992). Comparisons between the amino acid sequences of representative plant and mammalian MYB proteins indicate that there is a greater conservation between the same repeat from different proteins, than between the R2 and R3 repeats from the same protein (Martin and Paz-Ares, Trends Genet. 13[2]:67-73, 1997). More than 100 MYB genes have been reported from Arabidopsis thaliana (Romero et al., Plant J. 14[3]:273-284, 1998), representing the largest regulatory gene family currently known in plants. DNA-binding studies have demonstrated that there are differences, but also frequent overlaps, in binding specificity among plant MYB proteins, in line with the distinct but often related functions that are beginning to be recognized for these proteins. Studies involving the eight putative base-contacting residues in MYB DNA binding domains have revealed that at least six are fully conserved in all plant MYB proteins identified to date and the remaining two are conserved in at least 80% of these proteins (Martin and Paz-Ares, Trends Genet. 13[2]:67-73, 1997). Mutational analysis involving residues that do not contact bases have indicated that the sequence-specific binding capacity of MYBs is affected and this may account for some of the differences in the DNA-binding specificity between plant MYB proteins (Solano et al., J. Biol. Chem. 272[5]:2889-2895, 1997). This large-sized gene family may contribute to the regulatory flexibility underlying the developmental and metabolic plasticity displayed by plants.

[0013] Homeotic transcription factors have, in animals, been implicated in a number of developmental processes including, for example, the control of pattern formation in insects and vertebrate embryos and the specification of cell differentiation in many tissues (Ingham, Nature 335:25-34, 1988; McGinnis and Krumlauf, Cell 68:283-302, 1992). Homeodomain secondary structures are characterized by a distinctive helix-turn-helix motif initially identified in bacterial DNA binding domains. This helix-turn-helix sequence/structure motif spans approximately 20 amino acids and is characterized by two short helices separated by a sharp 90 degree bend or turn (Harrison and Aggarwal, Ann. Rev. Biochem. 59:933-969, 1990). This helix has been shown to bind in the major groove of the DNA helix.

[0014] Plant homeobox genes have been identified in a number of plant species including Arabidopsis thaliana, maize, parsley and soybean. Expression pattern analysis of maize homeobox gene family members suggests that these transcription factors may be involved in defining specific regions in the vegetative apical meristem, potentially involved in the initiation of leaf structures (Jackson et al., Development 120:405-413, 1994). Such observations imply that the plant homeobox genes, as for the animal homeobox genes, may be involved in the determination of cell fate.

[0015] Homeodomain-zipper (HD-zip) represents an additional family of homeodomain proteins. These homeodomain-zipper proteins (HD-zip) possess both the characteristic homeodomain linked to an additional leucine zipper dimerization motif. This family includes, for example, Athb-1 and Athb-2 (Sessa et al., EMBO J. 12:3507-3517, 1993) and Athb-4 (Carabelli et al., Plant J. 4:469-479, 1993).

[0016] The LIM domain is a specialized double-zinc finger motif found in a variety of proteins, in association with domains of divergent functions, such as the homeodomain (see the sunflower pollen-specific SF3 transcription factor: Baltz et al., Plant J. 2:713-721, 1992; or forming proteins composed primarily of LIM domains: Dawid et al., Trends Genet. 14[4]:156-162, 1998). LIM domains interact specifically with other LIM domains and with many different protein domains. LIM domains are thought to function as protein interaction modules, mediating specific contacts between members of functional complexes and modulating the activity of some of the constituent proteins. Nucleic acid binding by LIM domains, while suggested by structural considerations, remains an unproven possibility. However, it is possible that together with the homeodomain, the LIM domain could bind to the regulatory regions of developmentally controlled genes, as has been proposed for the paired box, a conserved sequence motif first identified in the paired (PRD) and gooseberry (GSB) homeodomain proteins from Drosophila (Triesman et al., Genes Dev. 5:594-604, 1991). The PRD box is also able to bind DNA in the absence of the homeodomain. LIM-domain proteins can be nuclear, cytoplasmic, or can shuttle between compartments. In the animal systems, several important LIM proteins have been shown to be associated with the cytoskeleton, having a role in adhesion-plaque and actin-microfilament organization. Among nuclear LIM proteins, the LIM homeodomain proteins form a major subfamily with important functions in cell lineage determination and pattern formation during animal development.

[0017] The AP2 (APETALA2) and EREBPs (ethylene-responsive element binding proteins) are the prototypic members of a family of transcription factors unique to plants, whose distinguishing characteristic is that they contain the so-called AP2 DNA-binding domain. AP2/EREBP genes form a large multigene family, and they play a variety of roles throughout the plant life cycle: from being key regulators of several developmental processes, like floral organ identity determination or control of leaf epidermal cell identity, to forming part of the mechanisms used by plants to respond to various types of biotic and environmental stress. In Arabidopsis thaliana, the homeotic gene APETALA2 (AP2) has been shown to control three salient processes during development: (1) the specification of flower organ identity and the regulation of floral organogenesis (Jofuku et al., Plant Cell 6:1211-1225, 1994); (2) establishment of flower meristem identity (Irish and Sussex, Plant Cell 2[8]:741-753, 1990); and (3) the temporal and spatial regulation of flower homeotic gene activity (Drews et al., Cell 65[6]:991-1002, 1991). DNA sequence analysis suggests that AP2 encodes a theoretical polypeptide of 432 aa, with a distinct 68 aa repeated motif termed the AP2 domain. This domain has been shown to be essential for AP2 function and contains within the 68 aa, an eighteen amino acid core region that is predicted to form an amphipathic α-helix (Jofuku et al., Plant Cell 6:1211-1225, 1994). Ap2-like domain-containing transcription factors have been also been identified in both Arabidopsis thaliana (Okamuro et al., Proc. Natl. Acad. Sci. USA 94:7076-7081, 1997) and in tobacco with the identification of the ethylene responsive element binding proteins (EREBPs) (Ohme-Takagi and Shinshi, Plant Cell 7[2]:173-182, 1995). In Arabidopsis, these RAP2 (related to AP2) genes encode two distinct subfamilies of AP2 domain containing proteins designated AP2-like and EREBP-like (Okamuro et al., Proc. Natl. Acad. Sci. USA 94:7076-7081, 1997). In vitro DNA binding has not been shown to date using the RAP2 proteins; however, based upon the presence of two highly conserved motifs YRG and RAYD within the AP2 domain, it has been proposed that binding DNA binding occurs in a manner similar to that of AP2 proteins.

[0018] Zinc finger domains of the type Cys₂His₂ appear to represent the most abundant DNA binding motif in eukaryotic transcription factors, with several thousand being identified to date (Berg and Shi, Science 271[5252]:1081-1085, 1996). A structural role for zinc in transcription factors was initially proposed in 1983 for the transcription factor IIIA (TFIIIA) (Hanas et al., J Biol. Chem. 258[23]:14120-14125, 1983). The Cys₂His₂ Zinc finger domains are characterized by tandem arrays of sequences of C-x(2,4)-C-x(3)-[LIVMFYWC]-x(8)-H-x(3,5)-H (where X represents a variable amino acid). Structurally, the zinc finger consists of two antiparallel β strands followed by an α helix (Lee et al., Science 245[4918]:635-637, 1989). This structural arrangement allows for the cysteine and histidine side chains to coordinate the zinc with the three other conserved residues forming the hydrophobic core adjacent to the metal coordination unit (Berg and Shi, Science 271[5252]:1081-1085, 1996). Many proteins possessing a Cys₂His₂ domain have been shown to interact with DNA in a sequence-specific manner. Crystal structure analysis of the mouse transcription factor Zif268 bound to a specific DNA target indicates that the zinc fingers in the protein/DNA complex reside in the major groove of the double helix and interacts with the DNA bases through amino acid side chains referred to as the contact residues (Pavletich and Pabo, Science 252[5007]:809-817, 1991). The orientations of the zinc finger domains with respect to the DNA are usually identical, with each domain contacting a contiguous 3-base pair subsite, the majority of which are directed to one strand. There are few interdomain interactions and the DNA recognition by each zinc finger appears to be largely independent of the other domains (Berg and Shi, Science 271[5252]:1081-1085, 1996).

[0019] The CCAAT-box element identified by Gelinas et al. (Nature 313[6000]:323-325, 1985) has been shown to occur between 80 bp and 300 bp from the transcription start site and may operate in either orientation, with possible cooperative interactions with multiple boxes (Tasanen et al., J. Biol. Chem. 267[16]:11513-11519, 1992); or other conserved motifs (Muro et al., J. Biol. Chem. 267[18]:12767-12774, 1992; Rieping and Schoffl, Mol. Gen. Genet. 231[2]:226-232, 1992). CCAAT-box related motifs have been identified in a number of promoters in a variety of organisms including yeast (Hahn et al., Science 240[4850]:317-321, 1988), rat (Maity et al., Proc. Natl. Acad. Sci. USA 87[14]:5378-5382, 1990; Vuorio et al., J. Biol. Chem. 265[36]:22480-22486, 1990); and plants (Rieping and Schoffl, Mol. Gen. Genet. 231[2]:226-232, 1992; Kehoe et al., Plant Cell 6[8]:1123-1134, 1994). In both yeast and vertebrates, a protein complex has been shown to bind to the CCAAT-motif. In yeast the complex consists of three proteins, known as HAP2, HAP3 and HAP5 (Pinkham and Guarente, Mol. Cell. Biol. 5[12]:3410-3416, 1985).

[0020] MADS box transcription factors interact with a conserved region of DNA known as the MADS box. All MADS box transcription factors contain a conserved DNA-binding/dimerization region, known as the MADS domain, which has been identified throughout the different kingdoms (Riechmann and Meyerowitz, Biol. Chem. 378[10]:1079-1101, 1997). Many of the MADS box genes isolated from plants are expressed primarily in floral meristems or floral organs, and are believed to play a role in either specifying inflorescence and floral meristem identity or in determining floral organ identity. One class of regulatory genes responsible for floral meristem identity and the pattern of meristem development includes the genes APETALA1 (AP1), APETALA2 (AP2), CAULIFLOWER (CAL), LEAFY (LFY) and AGAMOUS (AG) from Arabidopsis thaliana. Both LFY and AP1 have been shown to encode putative transcription factors (Weigel et al., Cell 69:843-859, 1992), with AP1 and AG each encoding putative transcription factors of the MADS box domain family (Yanofsky et al., Nature 346:35-39, 1990). Mutations in the Lfy gene have been shown to result in a partial conversion of flowers into infloresence shoots.

### SUMMARY OF THE INVENTION

[0021] Briefly, the present invention provides polynucleotides isolated from plants that encode transcription factors, together with polypeptides encoded by such polynucleotides. The isolated polynucleotides and polypeptides of the present invention may be usefully employed in the modification of gene expression in plants, since both tissue- and temporal-specific gene expression patterns have been shown to be governed by transcription factors during the natural development of a plant. The inventive polynucleotides and polypeptides may thus be employed in the manipulation of plant phenotypes.

[0022] In a first aspect, the present invention provides polynucleotides isolated from eucalyptus and pine which encode transcription factors, including transcription factors from the following families of regulatory proteins: bZIP; bZIP family of G-box binding factors; basic helix-loop-helix zipper (bHLH); homeotic/homeodomain/homeobox/MADS; homeodomain zipper (ZIP); LIM domain; AP2 and EREBs; zinc finger domains of type Cys2His2; CCAAT box elements; and MYB. In specific embodiments, the isolated polynucleotides of the present invention comprise a DNA sequence selected from the group consisting of: (a) sequences recited in SEQ ID NOS: 1-591, 1183-1912 and 1931-2106; (b) complements of the sequences recited in SEQ ID NOS: 1-591, 1183-1912 and 1931-2106; (c) reverse complements of the sequences recited in SEQ ID NOS: 1-591, 1183-1912 and 1931-2106; (d) reverse sequences of the sequences recited in SEQ ID NOS: 1-591, 1183-1912 and 1931-2106; and (e) sequences having either 60%, 75%, 80%, 90% or 95% identity, as defined herein, to a sequence of (a)-(d).

[0023] In a further aspect, isolated polypeptides encoded by the inventive polynucleotides are provided. In specific embodiments, such polypeptides comprise an amino acid sequence selected from the group consisting of: (a) sequences provided in SEQ ID NOS: 592-1182, 1913-1930 and 2107-2278; and (b) sequences having either 60%, 75%, 80%, 90% or 95% identity, as defined herein, to a sequence of (a).

[0024] In another aspect, the present invention provides polypeptides isolated from eucalyptus and pine which comprise transcription factor DNA-binding domains. In specific embodiments, such polypeptides comprise an amino acid sequence selected from the group consisting of: (a) sequences provided in SEQ ID NOS: 2279-2293 and 2296-2368; and (b) sequences having either 60%, 75%, 80%, 90% or 95% identity, as defined herein, to a sequence of (a).

[0025] In a further aspect, the invention provides genetic constructs comprising a polynucleotide of the present invention, either alone, in combination with one or more other polynucleotides disclosed herein, or in combination with one or more known DNA sequences, together with transformed cells comprising such constructs.

[0026] In specific embodiments, the inventive genetic constructs comprise, in the 5′-3′ direction, a gene promoter sequence; an open reading frame coding for at least a functional portion of a polypeptide encoded by an inventive polynucleotide, or a variant thereof; and a gene termination sequence. The open reading frame may be orientated in either a sense or antisense direction. Genetic constructs comprising an untranslated, or non-coding, region of a polynucleotide coding for a transcription factor polypeptide of the present invention or a nucleotide sequence complementary to an untranslated region, together with a gene promoter sequence and a gene termination sequence, are also provided. Preferably, the gene promoter and termination sequences are functional in a host plant. Most preferably, the gene promoter and termination sequences are those of the original genes but others generally used in the art, such as the Cauliflower Mosaic Virus (CMV) promoter, with or without enhancers such as the Kozak sequence or Omega enhancer, and Agrobacterium tumefaciens nopalin synthase terminator may be usefully employed in the present invention. Tissue-specific promoters may be employed in order to target expression to one or more desired tissues. The genetic construct may further include a marker for the identification of transformed cells.

[0027] In yet a further aspect, transgenic cells comprising the genetic constructs of the present invention are provided, together with organisms, such as plants, comprising such transgenic cells. Fruits, seeds, derivatives, progeny, propagules and other products of such transgenic plants are also contemplated and encompassed by the present invention. As used herein, the term “propagule” means any part of a plant that may be used in reproduction or propagation, sexual or asexual, including cuttings.

[0028] In yet another aspect, methods for modifying gene expression in a target organism are provided, such methods including stably incorporating into the genome of the organism a genetic construct of the present invention. In a preferred embodiment, the target organism is a plant, preferably a woody plant, more preferably selected from the group consisting of eucalyptus and pine species, and most preferably from the group consisting of Eucalyptus grandis and Pinus radiata. In a related aspect, a method for producing a target organism, such as a plant, having modified gene expression is provided, the method comprising transforming a plant cell with a genetic construct of the present invention to provide a transgenic cell and cultivating the transgenic cell under conditions conducive to regeneration and mature plant growth.

[0029] The present invention further provides methods for modifying the activity of a transcription factor in a target organism, such as a plant, comprising stably incorporating into the genome of the plant a genetic construct of the present invention. In a preferred embodiment, the target plant is a woody plant, preferably selected from the group consisting of eucalyptus and pine species, and most preferably from the group consisting of Eucalyptus grandis and Pinus radiata.

[0030] The above-mentioned and additional features of the present invention and the manner of obtaining them will become apparent, and the invention will be best understood by reference to the following more detailed description. All references disclosed herein are hereby incorporated by reference in their entirety as if each was incorporated individually.

### DETAILED DESCRIPTION OF THE INVENTION

[0031] The present invention provides isolated polynucleotides that encode plant transcription factors, together with isolated polypeptides encoded by such polynucleotides. As discussed above, transcription factors are components of the cellular “transcription apparatus” and are involved in the regulation of gene expression. Transcription factors are known to play a critical role in the growth and development of plants, and in cellular responses to external stimuli, such as environmental factors and disease pathogens. Transformation of plants with polynucleotides that encode proteins involved the cellular transcription process may thus be employed to modify properties such as lignin deposition, flower development, and male and female sterility.

[0032] Using the methods and materials of the present invention, the amount of a specific transcription factor may be increased or reduced by incorporating additional copies of polynucleotides, or fragments of said polynucleotides, encoding the transcription factor into the genome of a target organism, such as a plant. Similarly, an increase or decrease in the amount of the transcription factor may be obtained by transforming the target plant with antisense copies of such genes.

[0033] In one embodiment, the present invention provides isolated polynucleotides encoding, or partially encoding, plant transcription factors that are involved in the regulation of gene expression. The polynucleotides of the present invention were isolated from forestry plant sources, namely from Eucalyptus grandis and Pinus radiata, but they may alternatively be synthesized using conventional synthesis techniques. In specific embodiments, isolated polynucleotides of the present invention comprise a sequence selected from the group consisting of sequences identified as SEQ ID NOS: 1-591, 1183-1912 and 1931-2106; complements of the sequences identified as SEQ ID NOS: 1-591, 1183-1912 and 1931-2106; reverse complements of the sequences identified as SEQ ID NOS: 1-591, 1183-1912 and 1931-2106; reverse sequences of the sequences identified as SEQ ID NOS: 1-591, 1183-1912 and 1931-2106; sequences comprising at least a specified number of contiguous residues (x-mers) of any of the above-mentioned polynucleotides; extended sequences corresponding to any of the above polynucleotides; antisense sequences corresponding to any of the above polynucleotides; and variants of any of the above polynucleotides, as that term is described in this specification.

[0034] In another embodiment, the present invention provides isolated polypeptides encoded by the polynucleotides of SEQ ID NOS: 1-591, 1895-1912 and 1931-2106. In certain specific embodiments, such isolated polypeptides comprise a sequence selected from the group consisting of SEQ ID NOS: 592-1182, 1913-1930 and 2107-2278.

[0035] The inventive polynucleotides and polypeptides have demonstrated similarity to transformation factors that are known to be involved in regulation of transcription and/or expression in plants as shown below in Table 1.

TABLE 1

| Transcription factor family | Polynucleotide SEQ ID NO: |
|---|---|
| Basic leucine zipper (bZIP) | 133, 148, 194, 206, 246, 258, 261, 265, |
| | 279, 284, 285, 286, 290, 294, 303, 318, |
| | 331, 455, 470, 473, 497, 501, 512, 533, |
| | 538, 554, 558, 575, 1896-1899, 1938, |
| | 1939, 1950, 1958, 1959, 1961, 1963, 1969, |
| | 1973, 1981, 1983, 1989, 1991, 1998, 2002, |
| | 2004, 2021, 2022, 2025, 2028, 2029, 2033-2035, |
| | 2039, 2042, 2043, 2046, 2054, 2056, |
| | 2061, 2063, 2073, 2078, 2079, 2089, 2090, |
| | 2101, 2103, 2106 |
| bZIP family of G-box binding factors | 128, 136, 141, 142, 184, 202, 222, 244, |
| | 329, 541, 545 |
| Basic helix-loop-helix zipper | 157, 179, 223, 271, 274, 305, 317, 548, 563 |
| Myb | 138, 167, 214, 221, 232, 248, 252, 254, |
| | 255, 270, 276, 278, 280, 281, 282, 283, |
| | 292, 293, 315, 319, 328, 463, 483, 485, |
| | 486, 491, 492, 494, 502, 504, 507, 508, |
| | 510, 515, 518, 519, 520, 521, 527, 534, |
| | 536, 537, 540, 553, 559, 566, 572, 588, |
| | 1905, 1906, 1931, 1932, 1934-1936, 1940, |
| | 1948, 1949, 1951, 1953-1955, 1957, 1960, |
| | 1962, 1964-1968, 1974, 1975, 1977-1979, |
| | 1982, 1984-1988, 1992, 1994-1997, 2001, |
| | 2003, 2013-2015, 2024, 2026, 2027, 2030, |
| | 2032, 2036-2038, 2041, 2044, 2045, 2047-2049, |
| | 2051, 2052, 2057-2060, 2065, 2067, |
| | 2071, 2072, 2074-2077, 2080-2088, 2104, |
| | 2105 |
| Homeotic/homeodomain/homeobox/ | 2, 3, 4, 7, 9, 10, 11, 12, 13, 17, 19, 25, 26, |
| MADS | 27, 28, 29, 31, 32, 34, 35, 36, 37, 39, 40, |
| | 44, 45, 49, 50, 51, 52, 54, 55, 57, 60, 62, |
| | 63, 64, 65, 66, 69, 72, 74, 76, 77, 79, 82, |
| | 84, 88, 89, 92, 94, 96, 97, 98, 100, 102, |
| | 103, 104, 105, 106, 107, 108, 11, 112, 114, |
| | 116, 117, 123, 125, 127, 168, 185, 249, |
| | 250, 332, 333, 334, 336, 337, 338, 340, |
| | 341, 343, 344, 345, 346, 347, 348, 349, |
| | 350, 351, 353, 354, 355, 356, 357, 359, |
| | 360, 361, 362, 364, 365, 366, 367, 368, |
| | 370, 371, 372, 373, 374, 375, 376, 379, |
| | 380, 383, 384, 385, 386, 387, 389, 392, |
| | 393, 394, 398, 399, 400, 401, 402, 403, |
| | 406, 408, 409, 410, 412, 414, 416, 417, |
| | 418, 420, 422, 424, 425, 426, 475, 526, |
| | 529, 580, 591, 1901, 1902, 1937, 1941-1947, |
| | 1952, 1970-1972, 1976, 1980, 1990, |
| | 1993, 1999, 2000, 2006-2012, 2016-2020, |
| | 2023, 2031, 2040, 2050, 2053, 2055, 2062, |
| | 2064, 2066, 2068-2070, 2091-2100 |
| Homeodomain zipper (HDZIP) | 1, 5, 6, 14, 16, 20, 21, 22, 23, 30, 33, 41, |
| | 42, 47, 58, 59, 61, 68, 70, 71, 73, 75, 80, |
| | 86, 87, 90, 91, 93, 115, 119, 121, 126, 335, |
| | 339, 342, 352, 358, 363, 369, 377, 381, |
| | 388, 390, 396, 397, 415, 419, 421, 423, |
| | 2005, 2102 |
| LIM domain | 15, 18, 24, 43, 78, 81, 83, 198, 210, 225, |
| | 273, 378, 391, 433, 437, 450, 452 |
| AP2 and EREBs | 120, 124, 170, 171, 219, 220, 224, 226, |
| | 229, 230, 238, 242, 243, 245, 247, 256, |
| | 301, 320, 330, 432, 434, 435, 436, 445, |
| | 447, 451, 453, 454, 459, 466, 469, 476, |
| | 481, 490, 524, 546, 549, 570, 1895 |
| Zinc finger domains of type Cys2His2 | 132, 146, 154, 180, 181, 182, 183, 191, |
| | 207, 227, 234, 288, 323, 324, 325, 326, |
| | 404, 535, 567, 584, 585, 586, 587, 589, 590 |
| CCAAT box elements | 155, 174, 266, 309, 431, 460, 484, 499, |
| | 542, 551, 574, 583 |
| Other transcription factors | 8, 38, 46, 48, 53, 56, 67, 85, 95, 99, 101, |
| | 109, 110, 113, 118, 122, 129, 130, 131, |
| | 134, 135, 137, 139, 140, 143, 1444, 145, |
| | 147, 149, 150, 151, 152, 153, 156, 158, |
| | 159, 160, 161, 162, 163, 164, 165, 166, |
| | 169, 172, 173, 175, 176, 177, 178, 186, |
| | 187, 188, 189, 190, 192, 193, 195, 196, |
| | 197, 199, 200, 201, 203, 204, 205, 208, |
| | 209, 211, 212, 213, 215, 216, 217, 218, |
| | 228, 231, 233, 235, 236, 237, 239, 240, |
| | 241, 251, 253, 257, 259, 260, 262, 263, |
| | 264, 267, 268, 269, 272, 275, 277, 287, |
| | 289, 291, 295, 296, 297, 298, 299, 300, |
| | 302, 304, 306, 307, 308, 310, 311, 312, |
| | 313, 314, 316, 321, 322, 327, 382, 395, |
| | 405, 407, 411, 413, 4127, 428, 429, 430, |
| | 438, 439, 440, 441, 442, 443, 444, 446, |
| | 449, 456, 457, 458, 461, 462, 464, 465, |
| | 467, 468, 471, 472, 474, 477, 478, 479, |
| | 480, 482, 487, 488, 489, 493, 495, 496, |
| | 498, 500, 505, 506, 509, 511, 513, 514, |
| | 516, 517, 522, 523, 525, 528, 530, 531, |
| | 532, 539, 543, 544, 547, 550, 552, 555, |
| | 556, 557, 560, 561, 562, 564, 565, 568, |
| | 569, 571, 573, 577, 578, 579, 581, 582, |
| | 448, 1183-1894, 1900, 1903, 1904, 1907, |
| | 1908-1912, 1933, 1956 |

[0036] The term “polynucleotide(s),” as used herein, means a single or double-stranded polymer of deoxyribonucleotide or ribonucleotide bases and includes DNA and corresponding RNA molecules, including HnRNA and mRNA molecules, both sense and anti-sense strands, and comprehends cDNA, genomic DNA and recombinant DNA, as well as wholly or partially synthesized polynucleotides. An HnRNA molecule contains introns and corresponds to a DNA molecule in a generally one-to-one manner. An mRNA molecule corresponds to an HnRNA and DNA molecule from which the introns have been excised. A polynucleotide may consist of an entire gene, or any portion thereof. Operable anti-sense polynucleotides may comprise a fragment of the corresponding polynucleotide, and the definition of “polynucleotide” therefore includes all such operable anti-sense fragments. Anti-sense polynucleotides and techniques involving anti-sense polynucleotides are well known in the art and are described, for example, in Robinson-Benion et al., “Antisense techniques,” Methods in Enzymol. 254[23]:363-375, 1995; and Kawasaki et al., Artific. Organs 20[8]:836-848, 1996.

[0037] The definition of the terms “complement”, “reverse complement” and “reverse sequence”, as used herein, is best illustrated by the following example. For the sequence 5′ AGGACC 3′, the complement, reverse complement and reverse sequence are as follows:

| | |
|---|---|
| complement | 3′ TCCTGG 5′ |
| reverse complement | 3′ GGTCCT 5′ |
| reverse sequence. | 5′ CCAGGA 3′ |

[0038] Preferably, sequences that are complements of a specifically recited polynucleotide sequence are complementary over the entire length of the specific polynucleotide sequence. The term “polypeptide”, as used herein, encompasses amino acid chains of any length including full length proteins, wherein amino acid residues are linked by covalent peptide bonds. Polypeptides of the present invention may be naturally purified products, or may be produced partially or wholly using recombinant techniques. The term “polypeptide encoded by a polynucleotide” as used herein, includes polypeptides encoded by a nucleotide sequence which includes the partial isolated DNA sequences of the present invention.

[0039] All of the polynucleotides and polypeptides described herein are isolated and purified, as those terms are commonly used in the art. Preferably, the polypeptides and polynucleotides are at least about 80% pure, more preferably at least about 90% pure, and most preferably at least about 99% pure.

[0040] Some of the polynucleotides of the present invention are “partial” sequences, in that they do not represent a full length gene encoding a full length polypeptide. Such partial sequences may be extended by analyzing and sequencing various DNA libraries using primers and/or probes and well known hybridization and/or PCR techniques. Partial sequences may be extended until an open reading frame encoding a polypeptide, a full length polynucleotide and/or gene capable of expressing a polypeptide, or another useful portion of the genome is identified. Such extended sequences, including full length polynucleotides and genes, are described as “corresponding to” a sequence identified as one of the sequences of SEQ ID NOS: 1-591, 1183-1912 and 1931-2106, or a variant thereof, or a portion of one of the sequences of SEQ ID NOS: 1-591, 1183-1912 and 1931-2106, or a variant thereof, when the extended polynucleotide comprises an identified sequence or its variant, or an identified contiguous portion (x-mer) of one of the sequences of SEQ ID NOS: 1-591, 1183-1912 and 1931-2106, or a variant thereof. Such extended polynucleotides may have a length of from about 50 to about 4,000 nucleic acids or base pairs, and preferably have a length of less than about 4,000 nucleic acids or base pairs, more preferably yet a length of less than about 3,000 nucleic acids or base pairs, more preferably yet a length of less than about 2,000 nucleic acids or base pairs. Under some circumstances, extended polynucleotides of the present invention may have a length of less than about 1,800 nucleic acids or base pairs, preferably less than about 1,600 nucleic acids or base pairs, more preferably less than about 1,400 nucleic acids or base pairs, more preferably yet less than about 1,200 nucleic acids or base pairs, and most preferably less than about 1,000 nucleic acids or base pairs.

[0041] Similarly, RNA sequences, reverse sequences, complementary sequences, antisense sequences, and the like, corresponding to the polynucleotides of the present invention, may be routinely ascertained and obtained using the cDNA sequences identified as SEQ ID NOS: 1-591, 1183-1912 and 1931-2106.

[0042] The polynucleotides identified as SEQ ID NOS: 1-591, 1183-1912 and 1931-2106 may contain open reading frames (“ORFs”) or partial open reading frames encoding polypeptides. Open reading frames may be identified using techniques that are well known in the art. These techniques include, for example, analysis for the location of known start and stop codons, most likely reading frame identification based on codon frequencies, etc. Suitable tools and software for ORF analysis include, for example, GeneWise, available from The Sanger Center, Wellcome Trust Genome Campus, Hinxton, Cambridge, CB10 1SA, United Kingdom; Diogenes, available from Computational Biology Centers, University of Minnesota, Academic Health Center, UMHG Box 43 Minneapolis Minn. 55455; and GRAIL, available from the Informatics Group, Oak Ridge National Laboratories, Oak Ridge, Tennessee Tenn. Open reading frames and portions of open reading frames may be identified in the polynucleotides of the present invention. Once a partial open reading frame is identified, the polynucleotide may be extended in the area of the partial open reading frame using techniques that are well known in the art until the polynucleotide for the full open reading frame is identified. Thus, open reading frames encoding polypeptides may be identified using the polynucleotides of the present invention.

[0043] Once open reading frames are identified in the polynucleotides of the present invention, the open reading frames may be isolated and/or synthesized. Expressible genetic constructs comprising the open reading frames and suitable promoters, initiators, terminators, etc., which are well known in the art, may then be constructed. Such genetic constructs may be introduced into a host cell to express the polypeptide encoded by the open reading frame. Suitable host cells may include various prokaryotic and eukaryotic cells, including plant cells, mammalian cells, bacterial cells, algae and the like.

[0044] Polypeptides encoded by the polynucleotides of the present invention may be expressed and used in various assays to determine their biological activity. Such polypeptides may be used to raise antibodies, to isolate corresponding interacting proteins or other compounds, and to quantitatively determine levels of interacting proteins or other compounds.

[0045] As used herein, the term “variant” comprehends nucleotide or amino acid sequences different from the specifically identified sequences, wherein one or more nucleotides or amino acid residues is deleted, substituted, or added. Variants may be naturally occurring allelic variants, or non-naturally occurring variants. Variant sequences (polynucleotide or polypeptide) preferably exhibit at least 50%, more preferably at least 75%, more preferably at least 85%, more preferably at least 90% and most preferably at least 95% identity to a sequence of the present invention. The percentage identity is determined by aligning the two sequences to be compared as described below, determining the number of identical residues in the aligned portion, dividing that number by the total number of residues in the inventive (queried) sequence, and multiplying the result by 100. By way of illustration only, assume an inventive polynucleotide having 220 nucleotides has a hit to a polynucleotide sequence in the EMBL database having 520 nucleotides over a stretch of 23 nucleotides in the alignment produced by the BLASTN algorithm using the parameters described above. The 23 nucleotide region includes 21 identical nucleotides, one gap and one different nucleotide. The percentage identity of the inventive polynucleotide to the hit in the EMBL library is thus 21/220 times 100, or 9.5%. The polynucleotide sequence in the EMBL database is thus not a variant of the inventive polynucleotide.

[0046] Polynucleotide and polypeptide sequences may be aligned, and percentage of identical residues in a specified region may be determined against another polynucleotide or polypeptide sequence, using computer algorithms that are publicly available. Two exemplary algorithms for aligning and identifying the similarity of polynucleotide sequences are the BLASTN and FASTA algorithms. Polynucleotides may also be analyzed using the BLASTX algorithm, which compares the six-frame conceptual translation products of a nucleotide query sequence (both strands) against a protein sequence database. The similarity of polypeptide sequences may be examined using the BLASTP algorithm. The BLASTN, BLASTX and BLASTP programs are available on the NCBI anonymous FTP server, and from the National Center for Biotechnology Information (NCBI) National Library of Medicine, Building 38A, Room 8N805, Bethesda, Md. 20894, USA. The BLASTN algorithm Version 2.0.4 [Feb. 24, 1998] and Version 2.0.6 [Sep. 16, 1998], set to the default parameters described in the documentation and distributed with the algorithm, are preferred for use in the determination of polynucleotide variants according to the present invention. The BLASTP algorithm, is preferred for use in the determination of polypeptide variants according to the present invention. The use of the BLAST family of algorithms, including BLASTN, BLASTP, and BLASTX, is described at NCBI's Internet website and in the publication of Altschul et al., Nucleic Acids Res. 25:3389-3402, 1997.

[0047] The computer algorithm FASTA is available on the Internet, and from the University of Virginia by contacting David Hudson, Assistant Provost for Research, University of Virginia, PO Box 9025, Charlottesville, Va. Version 2.0u4 [February 1996], set to the default parameters described in the documentation and distributed with the algorithm, may be used in the determination of variants according to the present invention. The use of the FASTA algorithm is described in Pearson and Lipman, Proc. Natl. Acad. Sci. USA 85:2444-2448, 1988; and Pearson, Methods in Enzymol. 183:63-98, 1990.

[0048] The following running parameters are preferred for determination of alignments and similarities using BLASTN that contribute to the E values and percentage identity for polynucleotide sequences: Unix running command: blastall -p blastn -d embldb -e 10 -G0 -E0 -r 1 -v 30 -b 30 -i queryseq -o results; the parameters are: -p Program Name [String]; -d Database [String]; -e Expectation value (E) [Real]; -G Cost to open a gap (zero invokes default behavior) [Integer]; -E Cost to extend a gap (zero invokes default behavior) [Integer]; -r Reward for a nucleotide match (blastn only) [Integer]; -v Number of one-line descriptions (V) [Integer]; -b Number of alignments to show (B) [Integer]; -i Query File [File In]; and -o BLAST report Output File [File Out] Optional.

[0049] The following running parameters are preferred for determination of alignments and similarities using BLASTP that contribute to the E values and percentage identity of polypeptide sequences: blastall -p blastp -d swissprotdb -e 10 -G 0 -E 0 -v 30 -b 30 -i queryseq -o results; wherein the parameters are: -p Program Name [String]; -d Database [String]; -e Expectation value (E) [Real]; -G Cost to open a gap (zero invokes default behavior) [Integer]; -E Cost to extend a gap (zero invokes default behavior) [Integer]; -v Number of one-line descriptions (v) [Integer]; -b Number of alignments to show (b) [Integer]; -I Query File [File In]; -o BLAST report Output File [File Out] Optional.

[0050] The “hits” to one or more database sequences by a queried sequence produced by BLASTN, FASTA, BLASTP or a similar algorithm, align and identify similar portions of sequences. The hits are arranged in order of the degree of similarity and the length of sequence overlap. Hits to a database sequence generally represent an overlap over only a fraction of the sequence length of the queried sequence.

[0051] The BLASTN, FASTA and BLASTP algorithms also produce “Expect” values for alignments. The Expect value (E) indicates the number of hits one can “expect” to see over a certain number of contiguous sequences by chance when searching a database of a certain size. The Expect value is used as a significance threshold for determining whether the hit to a database, such as the preferred EMBL database, indicates true similarity. For example, an E value of 0.1 assigned to a polynucleotide hit is interpreted as meaning that in a database of the size of the EMBL database, one might expect to see 0.1 matches over the aligned portion of the sequence with a similar score simply by chance. By this criterion, the aligned and matched portions of the polynucleotide sequences then have a probability of 90% of being the same. For sequences having an E value of 0.01 or less over aligned and matched portions, the probability of finding a match by chance in the EMBL database is 1% or less using the BLASTN or FASTA algorithm.

[0052] According to one embodiment, “variant” polynucleotides and polypeptides, with reference to each of the polynucleotides and polypeptides of the present invention, preferably comprise sequences having the same number or fewer nucleic or amino acids than each of the polynucleotides or polypeptides of the present invention and producing an E value of 0.01 or less when compared to the polynucleotide or polypeptide of the present invention. That is, a variant polynucleotide or polypeptide is any sequence that has at least a 99% probability of being the same as the polynucleotide or polypeptide of the present invention, measured as having an E value of 0.01 or less using the BLASTN, FASTA, or BLASTP algorithms set at parameters described above.

[0053] Alternatively, variant polynucleotides of the present invention hybridize to the polynucleotide sequences recited in SEQ ID NOS: 1-591, 1183-1912 and 1931-2106, or complements, reverse sequences, or reverse complements of those sequences, under stringent conditions. As used herein, “stringent conditions” refers to prewashing in a solution of 6×SSC, 0.2% SDS; hybridizing at 65° C., 6×SSC, 0.2% SDS overnight; followed by two washes of 30 minutes each in 1×SSC, 0.1% SDS at 65° C. and two washes of 30 minutes each in 0.2×SSC, 0.1% SDS at 65° C.

[0054] The present invention also encompasses polynucleotides that differ from the disclosed sequences but that, as a consequence of the degeneracy of the genetic code, encode a polypeptide which is the same as that encoded by a polynucleotide of the present invention. Thus, polynucleotides comprising sequences that differ from the polynucleotide sequences recited in SEQ ID NOS: 1-591, 1183-1912 and 1931-2106; or complements, reverse sequences, or reverse complements thereof, as a result of conservative substitutions are contemplated by and encompassed within the present invention. Additionally, polynucleotides comprising sequences that differ from the polynucleotide sequences recited in SEQ ID NOS: 1-591, 1183-1912 and 1931-2106, or complements, reverse complements or reverse sequences thereof, as a result of deletions and/or insertions totaling less than 10% of the total sequence length are also contemplated by and encompassed within the present invention. Similarly, polypeptides comprising sequences that differ from the polypeptide sequences recited in SEQ ID NOS: 592-1182, 1913-1930 and 2107-2278, as a result of amino acid substitutions, insertions, and/or deletions totaling less than 10% of the total sequence length are contemplated by and encompassed within the present invention.

[0055] In addition to having a specified percentage identity to an inventive polynucleotide or polypeptide sequence, variant polynucleotides and polypeptides preferably have additional structure and/or functional features in common with the inventive polynucleotide or polypeptide. Polypeptides having a specified degree of identity to a polypeptide of the present invention share a high degree of similarity in their primary structure and have substantially similar functional properties. In addition to sharing a high degree of similarity in their primary structure to polynucleotides of the present invention, polynucleotides having a specified degree of identity to, or capable of hybridizing to an inventive polynucleotide preferably have at least one of the following features: (i) they contain an open reading frame, or partial open reading frame, encoding a polypeptide having substantially the same functional properties as the polypeptide encoded by the inventive polynucleotide; or (ii) they contain identifiable domains in common. Thus, in preferred embodiments, variants of the inventive polypeptides possess biological activities that are the same or similar to those of the inventive polypeptides. Such variant polypeptides function as transcription factors and are thus capable of modifying gene expression in a plant. Similarly, variant polynucleotides may encode polypeptides that function as transcription factors.

[0056] Polynucleotides of the present invention also comprehend polynucleotides comprising at least a specified number of contiguous residues (x-mers) of any of the polynucleotides identified as SEQ ID NOS: 1-591, 1183-1912 and 1931-2106, complements, reverse sequences, and reverse complements of such sequences, and their variants. Similarly, polypeptides of the present invention comprehend polypeptides comprising at least a specified number of contiguous residues (x-mers) of any of the polypeptides identified as SEQ ID NOS: 592-1182, 1913-1930 and 2107-2278, and their variants. As used herein, the term “x-mer,” with reference to a specific value of “x,” refers to a sequence comprising at least a specified number (“x”) of contiguous residues of any of the polynucleotides identified as SEQ ID NOS: 1-591, 1183-1912 and 1931-2106, or the polypeptides identified as SEQ ID NOS: 592-1182, 1913-1930 and 2107-2278. According to preferred embodiments, the value of x is preferably at least 20, more preferably at least 40, more preferably yet at least 60, and most preferably at least 80. Thus, polynucleotides and polypeptides of the present invention comprise a 20-mer, a 40-mer, a 60-mer, an 80-mer, a 100-mer, a 120-mer, a 150-mer, a 180-mer, a 220-mer, a 250-mer, a 300-mer, a 400-mer, a 500-mer or a 600-mer of a polynucleotide or polypeptide identified as SEQ ID NOS: 1-2368, and variants thereof.

[0057] The inventive polynucleotides may be isolated by high throughput sequencing of cDNA libraries prepared from Eucalyptus grandis and Pinus radiata as described below in Examples 1 and 2. Alternatively, oligonucleotide primer and probes based on the sequences provided in SEQ ID NOS: 1-591, 1183-1912 and 1931-2106 may be prepared as detailed below and used to identify positive clones in either cDNA or genomic DNA libraries from Eucalyptus grandis and Pinus radiata by means of hybridization or PCR techniques. Probes may be shorter than the sequences provided herein but should be at least about 10, preferably at least 15, and most preferably at least about 20 nucleotides in length. Hybridization and PCR techniques suitable for use with such oligonucleotides are well known in the art, and include those taught by Sambrook et al., Ibid. Positive clones may be analyzed by restriction enzyme digestion, DNA sequencing or the like.

[0058] The polynucleotides of the present invention may alternatively be synthesized using techniques that are well known in the art. The polynucleotides may be synthesized, for example, using automated oligonucleotide synthesizers (e.g., Beckman Oligo 1000M DNA Synthesizer) to obtain polynucleotide segments of up to 50 or more nucleic acids. A plurality of such polynucleotide segments may then be ligated using standard DNA manipulation techniques that are well known in the art of molecular biology. One conventional and exemplary polynucleotide synthesis technique involves synthesis of a single stranded polynucleotide segment having, for example, 80 nucleic acids, and hybridizing that segment to a synthesized complementary 85 nucleic acid segment to produce a 5 nucleotide overhang. The next segment may then be synthesized in a similar fashion, with a 5 nucleotide overhang on the opposite strand. The “sticky” ends ensure proper ligation when the two portions are hybridized. In this way, a complete polynucleotide of the present invention may be synthesized entirely in vitro.

[0059] In certain embodiments, the genetic constructs of the present invention include an open reading frame coding for at least a functional portion of a polypeptide of the present invention or a variant thereof. As used herein, the “functional portion” of a polypeptide is that portion which contains the active site essential for regulating gene expression, i.e., the portion of the molecule that is capable of binding to, or interacting with, the promoter of the gene to be expressed. The DNA-binding domain(s) for certain of the inventive polypeptides are identified below in Table 2. These DNA binding domains were identified using PROSITE 15.0 pattern or profile sequences as listed in the PROSITE database. PROSITE is available is described in Hofman et al., Nucleic Acids Res. 27:215-219, 1999; and in Bairoch, Nucleic Acids Res. 20:Suppl. 2013-2018, 1992.

TABLE 2

| | DNA-binding Domain(s) |
|---|---|
| Polynucleotide SEQ ID NO: | SEQ ID NO: |
| 1931 | 2283 |
| 1934 | 2284, 2285 |
| 1940 | 2288 |
| 1949 | 2293 |
| 1951 | 2279, 2280 |
| 1953 | 2296, 2297 |
| 1957 | 2298 |
| 1960 | 2301, 2302 |
| 1962 | 2307 |
| 1965 | 2308, 2309 |
| 1967 | 2281, 2282 |
| 1978 | 2320 |
| 1979 | 2321 |
| 1982 | 2322, 2323 |
| 1986 | 2324 |
| 1992 | 2335 |
| 1994 | 2336, 2337 |
| 1995 | 2338, 2339 |
| 1997 | 2340 |
| 2003 | 2286, 2287 |
| 2013 | 2289, 2290 |
| 2020 | 2291, 2292 |
| 2027 | 2299, 2300 |
| 2030 | 2303, 2304 |
| 2032 | 2305, 2306 |
| 2036 | 2310, 2311 |
| 2038 | 2312, 2313 |
| 2049 | 2314, 2315 |
| 2051 | 2316, 2317 |
| 2052 | 2318, 2319 |
| 2057 | 2325, 2326 |
| 2059 | 2327, 2328 |
| 2060 | 2329, 2330 |
| 2065 | 2331, 2332 |
| 2067 | 2333, 2334 |
| 2074 | 2342, 2343 |
| 2075 | 2344, 2345 |
| 2076 | 2346, 2347 |
| 2077 | 2348, 2349 |
| 2080 | 2352 |
| 2081 | 2353 |
| 2082 | 2354 |
| 2083 | 2355, 2356 |
| 2084 | 2357, 2358 |
| 2085 | 2359, 2360 |
| 2086 | 2361, 2362 |
| 2087 | 2365, 2366 |
| 2088 | 2367, 2368 |
| 2104 | 2350, 2351 |
| 2105 | 2363, 2364 |

[0060] The functional portion of a polypeptide may also be determined by targeted mutagenesis and screening of modified protein products with protocols well known in the art (Solano et al., J. Biol. Chem. 272:2889-95, 1997). The active site will generally exhibit high substrate specificity. Portions of the inventive polypeptides may be generated by synthetic or recombinant means. Synthetic polypeptides having fewer than about 100 amino acids, and generally fewer than about 50 amino acids, may be generated using techniques well known to those of ordinary skill in the art. For example, such polypeptides may be synthesized using any of the commercially available solid-phase techniques, such as the Merrifield solid-phase synthesis method, where amino acids are sequentially added to a growing amino acid chain. See Merrifield, J. Am. Chem. Soc. 85:2149-2154, 1963. Equipment for automated synthesis of polypeptides is commercially available from suppliers such as Perkin Elmer/Applied BioSystems, Inc. (Foster City, Calif.), and may be operated according to the manufacturer's instructions.

[0061] An open reading frame may be inserted in the genetic construct in a sense or antisense orientation, such that transformation of a target plant with the genetic construct will lead to a change in the amount of polypeptide compared to the wild-type plant. Transformation with a genetic construct comprising an open reading frame in a sense orientation will generally result in over-expression of the selected gene, while transformation with a genetic construct comprising an open reading frame in an antisense orientation will generally result in reduced expression of the selected gene. A population of plants transformed with a genetic construct comprising an open reading frame of the present invention in either a sense or antisense orientation may be screened for increased or reduced expression of the gene in question using techniques well known to those of skill in the art, and plants having the desired phenotypes may thus be isolated.

[0062] Alternatively, expression of a gene encoding a plant transcription factor may be inhibited by inserting a portion of an open reading frame of the present invention, in either sense or antisense orientation, in the genetic construct. Such portions need not be full-length but preferably comprise at least 25, and more preferably at least 50, residues of an inventive DNA sequence. A much longer portion or even the full length DNA corresponding to the complete open reading frame may be employed. The portion of the open reading frame does not need to be precisely the same as the endogenous sequence, provided that there is sufficient sequence similarity to achieve inhibition of the target gene. Thus a sequence derived from one species may be used to inhibit expression of a gene in a different species. A population of plants transformed with a genetic construct comprising an open reading frame of the present invention in either a sense or antisense orientation may be screened for increased or reduced expression of the gene in question using techniques well known to those of skill in the art, and plants having the desired phenotypes may thus be isolated.

[0063] In another embodiment, the inventive genetic constructs comprise a DNA sequence including an untranslated, or non-coding, region of a gene coding for a polypeptide of the present invention, or a DNA sequence complementary to such an untranslated region. Examples of untranslated regions which may be usefully employed in such constructs include introns and 5′-untranslated leader sequences. Transformation of a target plant with such a genetic construct may lead to a reduction in the amount of the polypeptide expressed in the plant by the process of cosuppression, in a manner similar to that discussed, for example, by Napoli et al. (Plant Cell 2:279-290, 1990), and de Carvalho Niebel et al. (Plant Cell 7:347-358, 1995).

[0064] Alternatively, regulation of polypeptide expression can be achieved by inserting appropriate sequences or subsequences (e.g. DNA or RNA) in ribozyme constructs (McIntyre and Manners, Transgenic Res. 5[4]:257-262, 1996). Ribozymes are synthetic RNA molecules that comprise a hybridizing region complementary to two regions, each of which comprises at least 5 contiguous nucleotides in a mRNA molecule encoded by one of the inventive polynucleotides. Ribozymes possess highly specific endonuclease activity, which autocatalytically cleaves the mRNA.

[0065] The genetic constructs of the present invention further comprise a gene promoter sequence and a gene termination sequence, operably linked to the DNA sequence to be transcribed, which control expression of the gene. The gene promoter sequence is generally positioned at the 5′ end of the DNA sequence to be transcribed, and is employed to initiate transcription of the DNA sequence. Gene promoter sequences are generally found in the 5′ untranslated region of a gene but they may exist downstream of the open reading frame, in introns (Luehrsen, Mol. Gen. Genet. 225:81-93, 1991) or in the coding region, as for example in a plant defence gene (Douglas et al., EMBO J. 10:1767-1775, 1991). When the construct includes an open reading frame in a sense orientation, the gene promoter sequence also initiates translation of the open reading frame. For genetic constructs comprising either an open reading frame in an antisense orientation or an untranslated region, the gene promoter sequence may consist only of a transcription initiation site having a RNA polymerase binding site.

[0066] A variety of gene promoter sequences which may be usefully employed in the genetic constructs of the present invention are well known in the art. The gene promoter sequence, and also the gene termination sequence, may be endogenous to the target plant host or may be exogenous, provided the promoter is functional in the target host. For example, the promoter and termination sequences may be from other plant species, plant viruses, bacterial plasmids and the like. Preferably, gene promoter and termination sequences are from the inventive sequences themselves.

[0067] Factors influencing the choice of promoter include the desired tissue specificity of the construct, and the timing of transcription and translation. For example, constitutive promoters, such as the 35S Cauliflower Mosaic Virus (CaMV 35S) promoter, will affect the activity of the enzyme in all parts of the plant. Use of a tissue specific promoter will result in production of the desired sense or antisense RNA only in the tissue of interest. With genetic constructs employing inducible gene promoter sequences, the rate of RNA polymerase binding and initiation can be modulated by external stimuli, such as light, heat, anaerobic stress, alteration in nutrient conditions and the like. Temporally regulated promoters can be employed to effect modulation of the rate of RNA polymerase binding and initiation at a specific time during development of a transformed cell. Preferably, the original promoters from the enzyme gene in question, or promoters from a specific tissue-targeted gene in the organism to be transformed, such as eucalyptus or pine are used. Other examples of gene promoters which may be usefully employed in the present invention include mannopine synthase (mas), octopine synthase (ocs) and those reviewed by Chua et al. (Science 244:174-181, 1989).

[0068] The gene termination sequence, which is located 3′ to the DNA sequence to be transcribed, may come from the same gene as the gene promoter sequence or may be from a different gene. Many gene termination sequences known in the art may be usefully employed in the present invention, such as the 3′ end of the Agrobacterium tumefaciens nopaline synthase gene. However, preferred gene terminator sequences are those from the original gene or from the target species to be transformed.

[0069] The genetic constructs of the present invention may also contain a selection marker that is effective in cells of the target organism, such as a plant, to allow for the detection of transformed cells containing the inventive construct. Such markers, which are well known in the art, typically confer resistance to one or more toxins. One example of such a marker is the NPTII gene whose expression results in resistance to kanamycin or hygromycin, antibiotics which are usually toxic to plant cells at a moderate concentration (Rogers et al., in Weissbach, A and Weissbach H, eds., Methods for Plant Molecular Biology, Academic Press Inc.: San Diego, Calif., 1988). Transformed cells can thus be identified by their ability to grow in media containing the antibiotic in question. Alternatively, the presence of the desired construct in transformed cells can be determined by means of other techniques well known in the art, such as Southern and Western blots.

[0070] A transcription initiation site is additionally included in the genetic construct when the sequence to be transcribed lacks such a site.

[0071] Techniques for operatively linking the components of the inventive genetic constructs are well known in the art and include the use of synthetic linkers containing one or more restriction endonuclease sites as described, for example, by Sambrook et al., (Molecular cloning: a laboratory manual, CSHL Press: Cold Spring Harbor, N.Y., 1989). The genetic construct of the present invention may be linked to a vector having at least one replication system, for example E. coli, whereby after each manipulation, the resulting construct can be cloned and sequenced and the correctness of the manipulation determined.

[0072] The genetic constructs of the present invention may be used to transform a variety of target organisms including, but not limited to, plants. Plants which may be transformed using the inventive constructs include both monocotyledonous angiosperms (e.g., grasses, corn, grains, oat, wheat and barley); and dicotyledonous angiosperms (e.g., Arabidopsis, tobacco, legumes, alfalfa, oaks, eucalyptus, maple); and gymnosperms (e.g., Scots pine; Aronen, Finnish Forest Res. Papers, Vol. 595, 1996); white spruce (Ellis et al., Biotechnology 11:84-89, 1993); and larch (Huang et al., In Vitro Cell 27:201-207, 1991). In a preferred embodiment, the inventive genetic constructs are employed to transform woody plants, herein defined as a tree or shrub whose stem lives for a number of years and increases in diameter each year by the addition of woody tissue. Preferably the target plant is selected from the group consisting of eucalyptus and pine species, most preferably from the group consisting of Eucalyptus grandis and Pinus radiata. Other species which may be usefully transformed with the genetic constructs of the present invention include, but are not limited to: pines such as Pinus banksiana, Pinus brutia, Pinus caribaea, Pinus clausa, Pinus contorta, Pinus coulteri, Pinus echinata, Pinus eldarica, Pinus ellioti, Pinus jeffreyi, Pinus lambertiana, Pinus monticola, Pinus nigra, Pinus palustrus, Pinus pinaster, Pinus ponderosa, Pinus resinosa, Pinus rigida, Pinus serotina, Pinus strobus, Pinus sylvestris, Pinus taeda, Pinus virginiana; other gymnosperms, such as Abies amabilis, Abies balsamea, Abies concolor, Abies grandis, Abies lasiocarpa, Abies magnifica, Abies procera, Chamaecyparis lawsoniona, Chamaecyparis nootkatensis, Chamaecyparis thyoides, Huniperus virginiana, Larix decidua, Larix laricina, Larix leptolepis, Larix occidentalis, Larix siberica, Libocedrus decurrens, Picea abies, Picea engelmanni, Picea glauca, Picea mariana, Picea pungens, Picea rubens, Picea sitchensis, Pseudotsuga menziesii, Sequoia gigantea, Sequoia sempervirens, Taxodium distichum, Tsuga canadensis, Tsuga heterophylla, Tsuga mertensiana, Thuja occidentalis, Thuja plicata; and Eucalypts, such as Eucalyptus alba, Eucalyptus bancroftii, Eucalyptus botyroides, Eucalyptus bridgesiana, Eucalyptus calophylla, Eucalyptus camaldulensis, Eucalyptus citriodora, Eucalyptus cladocalyx, Eucalyptus coccifera, Eucalyptus curtisii, Eucalyptus dalrympleana, Eucalyptus deglupta, Eucalyptus delagatensis, Eucalyptus diversicolor, Eucalyptus dunnii, Eucalyptus ficifolia, Eucalyptus globulus, Eucalyptus gomphocephala, Eucalyptus gunnii, Eucalyptus henryi, Eucalyptus laevopinea, Eucalyptus macarthurii, Eucalyptus macrorhyncha, Eucalyptus maculata, Eucalyptus marginata, Eucalyptus megacarpa, Eucalyptus melliodora, Eucalyptus nicholii, Eucalyptus nitens, Eucalyptus nova-anglica, Eucalyptus obliqua, Eucalyptus obtusiflora, Eucalyptus oreades, Eucalyptus pauciflora, Eucalyptus polybractea, Eucalyptus regnans, Eucalyptus resinifera, Eucalyptus robusta, Eucalyptus rudis, Eucalyptus saligna, Eucalyptus sideroxylon, Eucalyptus stuartiana, Eucalyptus tereticornis, Eucalyptus torelliana, Eucalyptus urnigera, Eucalyptus urophylla, Eucalyptus viminalis, Eucalyptus viridis, Eucalyptus wandoo and Eucalyptus youmanni; and hybrids of any of these species.

[0073] Techniques for stably incorporating genetic constructs into the genome of target plants are well known in the art and include Agrobacterium tumefaciens mediated introduction, electroporation, protoplast fusion, injection into reproductive organs, injection into immature embryos, high velocity projectile introduction and the like. The choice of technique will depend upon the target plant to be transformed. For example, dicotyledonous plants and certain monocots and gymnosperms may be transformed by Agrobacterium Ti plasmid technology, as described, for example by Bevan (Nucleic Acids Res. 12:8711-8721, 1984). Targets for the introduction of the genetic constructs of the present invention include tissues, such as leaf tissue, dissociated cells, protoplasts, seeds, embryos, meristematic regions; cotyledons, hypocotyls, and the like. The preferred method for transforming eucalyptus and pine is a biolistic method using pollen (see, for example, Aronen, in Finnish Forest Res. Papers 595:53, 1996) or easily regenerable embryonic tissues.

[0074] Once the cells are transformed, cells having the inventive genetic construct incorporated in their genome may be selected by means of a marker, such as the kanamycin resistance marker discussed above. Transgenic cells may then be cultured in an appropriate medium to regenerate whole plants, using techniques well known in the art. In the case of protoplasts, the cell wall is allowed to reform under appropriate osmotic conditions. In the case of seeds or embryos, an appropriate germination or callus initiation medium is employed. For explants, an appropriate regeneration medium is used. Regeneration of plants is well established for many species. For a review of regeneration of forest trees see Dunstan et al., “Somatic embryogenesis in woody plants,” in Thorpe T A, ed., In vitro embryogenesis of plants (Current Plant Science and Biotechnology in Agriculture, 20[12]:471-540, 1995. Specific protocols for the regeneration of spruce are discussed by Roberts et al. (“Somatic embryogenesis of spruce,” in Redenbaugh K, ed., Synseed: applications of synthetic seed to crop improvement, CRC Press: 23:427-449, 1993). Transformed plants having the desired phenotype may be selected using techniques well known in the art. The resulting transformed plants may be reproduced sexually or asexually, using methods well known in the art, to give successive generations of transgenic plants.

[0075] As discussed above, the production of RNA in target cells can be controlled by choice of the promoter sequence, or by selecting the number of functional copies or the site of integration of the DNA sequences incorporated into the genome of the target host. A target organism may be transformed with more than one genetic construct of the present invention, thereby modulating the activity of more than one transcription factor, for example affecting gene expression in more than one tissue, or at more than one time in the development of the target organism. Similarly, a genetic construct may be assembled containing more than one open reading frame coding for a polypeptide of the present invention or more than one untranslated region of a gene coding for such a polypeptide. The polynucleotides of the present inventive may also be employed in combination with other known sequences encoding transcription factors.

[0076] Polynucleotides of the present invention may also be used to specifically suppress gene expression by methods that operate post-transcriptionally to block the synthesis of products of targeted genes, such as RNA interference (RNAi), and quelling. For a review of techniques of gene suppression see Science, 288:1370-1372, 2000. Exemplary gene silencing methods are also provided in WO 99/49029 and WO 99/53050. Posttranscriptional gene silencing is brought about by a sequence-specific RNA degradation process that results in the rapid degradation of transcripts of sequence-related genes. Studies have provided evidence that double-stranded RNA may act as a mediator of sequence-specific gene silencing (see, e.g., review by Montgomery and Fire, Trends in Genetics, 14:255-258, 1998). Gene constructs that produce transcripts with self-complementary regions are particularly efficient at gene silencing. A unique feature of this posttranscriptional gene silencing pathway is that silencing is not limited to the cells where it is initiated. The gene-silencing effects may be disseminated to other parts of an organism and even transmitted through the germ line to several generations.

[0077] The polynucleotides of the present invention may be employed to generate gene silencing constructs and or gene-specific self-complementary RNA sequences that can be delivered by conventional art-known methods to plant tissues, such as forestry tree tissues. Within genetic constructs, sense and antisense sequences can be placed in regions flanking an intron sequence in proper splicing orientation with donor and acceptor splicing sites, such that intron sequences are removed during processing of the transcript, and sense and antisense sequences, as well as splice junction sequences, bind together to form double-stranded RNA. Alternatively, spacer sequences of various lengths may be employed to separate self-complementary regions of sequence in the construct. During processing of the gene construct transcript, intron sequences are spliced-out, allowing sense and anti-sense sequences, as well as splice junction sequences, to bind forming double-stranded RNA. Select ribonucleases bind to and cleave the double-stranded RNA, thereby initiating the cascade of events leading to degradation of specific mRNA gene sequences, and silencing specific genes. Alternatively, rather than using a gene construct to express the self-complementary RNA sequences, the gene-specific double-stranded RNA segments are delivered to one or more targeted areas to be internalized into the cell cytoplasm to exert a gene silencing effect. Gene silencing RNA sequences comprising the polynucleotides of the present invention are useful for creating genetically modified plants with desired phenotypes as well as for characterizing genes (e.g., in high-throughput screening of sequences), and studying their functions in intact organisms.

[0078] Oligonucleotide probes and primers complementary to and/or corresponding to SEQ ID NOS: 1-591, 1183-1912 and 1931-2106, and variants of those sequences, are also comprehended by the present invention. Such oligonucleotide probes and primers are substantially complementary to the polynucleotide of interest. As used herein, the term “oligonucleotide” refers to a relatively short segment of a polynucleotide sequence, generally comprising between 6 and 60 nucleotides, and comprehends both probes for use in hybridization assays and primers for use in the amplification of DNA by polymerase chain reaction. An oligonucleotide probe or primer is described as “corresponding to” a polynucleotide of the present invention, including one of the sequences set out as SEQ ID NOS: 1-591, 1183-1912 and 1931-2106, or a variant, if the oligonucleotide probe or primer, or its complement, is contained within one of the sequences set out as SEQ ID NOS: 1-591, 1183-1912 and 1931-2106, or a variant of one of the specified sequences.

[0079] Two single stranded sequences are said to be substantially complementary when the nucleotides of one strand, optimally aligned and compared, with the appropriate nucleotide insertions and/or deletions, pair with at least 80%, preferably at least 90% to 95%, and more preferably at least 98% to 100%, of the nucleotides of the other strand. Alternatively, substantial complementarity exists when a first DNA strand will selectively hybridize to a second DNA strand under stringent hybridization conditions. Stringent hybridization conditions for determining complementarity include salt conditions of less than about 1 M, more usually less than about 500 mM, and preferably less than about 200 mM. Hybridization temperatures can be as low as 5° C., but are generally greater than about 22° C., more preferably greater than about 30° C., and most preferably greater than about 37° C. Longer DNA fragments may require higher hybridization temperatures for specific hybridization. Since the stringency of hybridization may be affected by other factors such as probe composition, presence of organic solvents and extent of base mismatching, the combination of parameters is more important than the absolute measure of any one alone. The DNA from plants or samples or products containing plant material can be either genomic DNA or DNA derived by preparing cDNA from the RNA present in the sample.

[0080] In addition to DNA-DNA hybridization, DNA-RNA or RNA-RNA hybridization assays are also possible. In the first case, the mRNA from expressed genes would then be detected instead of genomic DNA or cDNA derived from mRNA of the sample. In the second case, RNA probes could be used. In addition, artificial analogs of DNA hybridizing specifically to target sequences could also be used.

[0081] In specific embodiments, the oligonucleotide probes and/or primers comprise at least about 6 contiguous residues, more preferably at least about 10 contiguous residues, and most preferably at least about 20 contiguous residues complementary to a polynucleotide sequence of the present invention. Probes and primers of the present invention may be from about 8 to 100 base pairs in length or, preferably from about 10 to 50 base pairs in length or, more preferably from about 15 to 40 base pairs in length. The probes can be easily selected using procedures well known in the art, taking into account DNA-DNA hybridization stringencies, annealing and melting temperatures, and potential for formation of loops and other factors, which are well known in the art. Tools and software suitable for designing probes and PCR primers, are available on the Internet. An exemplary software program suitable for designing probes, and especially for designing PCR primers, is available from Premier Biosoft International, 3786 Corina Way, Palo Alto, Calif. 94303-4504. Preferred techniques for designing PCR primers are also disclosed in Dieffenbach and Dyksler, PCR primer: a laboratory manual, CSHL Press: Cold Spring Harbor, N.Y., 1995.

[0082] A plurality of oligonucleotide probes or primers corresponding to a polynucleotide of the present invention may be provided in a kit form. Such kits generally comprise multiple DNA or oligonucleotide probes, each probe being specific for a polynucleotide sequence. Kits of the present invention may comprise one or more probes or primers corresponding to a polynucleotide of the present invention, including a polynucleotide sequence identified in SEQ ID NOS: 1-591, 1183-1912 and 1931-2106.

[0083] In one embodiment useful for high-throughput assays, the oligonucleotide probe kits of the present invention comprise multiple probes in an array format, wherein each probe is immobilized in a predefined, spatially addressable location on the surface of a solid substrate. Array formats which may be usefully employed in the present invention are disclosed, for example, in U.S. Pat. Nos. 5,412,087, 5,545,531, and PCT Publication No. WO 95/00530, the disclosures of which are hereby incorporated by reference.

[0084] The significance of high-throughput screening systems is apparent for applications such as plant breeding and quality control operations in which there is a need to identify large numbers of seed lots and plant seedlings, to examine samples or products for unwanted plant materials, to identify plants or samples or products containing plant material for quarantine purposes etc. or to ascertain the true origin of plants or samples or products containing plant material. Screening for the presence or absence of polynucleotides of the present invention used as identifiers for tagging plants is valuable for later detecting the amount of gene flow in plant breeding, introgression of genes via dispersed pollen, etc.

[0085] In this manner, oligonucleotide probe kits of the present invention may be employed to examine the presence/absence (or relative amounts in case of mixtures) of polynucleotides of the present invention in different samples or products containing different materials rapidly and in a cost-effective manner. Examples of plant species that may be examined using the present invention, include forestry species, such as pine and eucalyptus species, other tree species, agricultural plants including crop and forage plants, and horticultural plants.

[0086] Another aspect of the present invention involves collections of polynucleotides of the present invention. A collection of polynucleotides of the present invention, particularly the polynucleotides identified as SEQ ID NOS: 1-591, 1183-1912 and 1931-2106, and variants and x-mers thereof, may be recorded and/or stored on a storage medium and subsequently accessed for purposes of analysis, comparison, etc. Suitable storage media include magnetic media such as magnetic diskettes, magnetic tapes, CD-ROM storage media, optical storage media, and the like. Suitable storage media and methods for recording and storing information, as well as accessing information such as polynucleotide sequences recorded on such media, are well known in the art. The polynucleotide information stored on the storage medium is preferably computer-readable and may be used for analysis and comparison of the polynucleotide information.

[0087] Another aspect of the present invention thus involves storage medium on which are recorded a collection of the polynucleotides of the present invention, particularly a collection of the polynucleotides identified as SEQ ID NOS: 1-591, 1183-1912 and 1931-2106, and variants thereof, as well as x-mers of the polynucleotides of SEQ ID NOS: 1-591, 1183-1912 and 1931-2106, and extended sequences, probes and primers comprising or corresponding to a polynucleotide of SEQ ID NOS: 1-591, 1183-1912 and 1931-2106. According to one embodiment, the storage medium includes a collection of at least 20, preferably at least 50, more preferably at least 100, and most preferably at least 200 of the polynucleotides of the present invention, preferably the polynucleotides identified as SEQ ID NOS: 1-591, 1183-1912 and 1931-2106, or variants of such polynucleotides.

[0088] The following examples are offered by way of illustration and not by way of limitation.

### EXAMPLE 1

### Isolation and Characterization of cDNA Clones from Eucalyptus grandis

[0089] Nine Eucalyptus grandis cDNA expression libraries (prepared from either mature shoot buds, early wood phloem, floral tissue, leaf tissue (two independent libraries), feeder roots, structural roots, xylem or early wood xylem) were constructed and screened as follows.

[0090] Total RNA was extracted from the plant tissue using the protocol of Chang et al. (Plant Molecular Biology Reporter 11:113-116, 1993). mRNA was isolated from the total RNA preparation using either a Poly(A) Quik mRNA Isolation Kit (Stratagene, La Jolla, Calif.) or Dynal Beads Oligo (dT)₂₅ (Dynal, Skogen, Norway). A cDNA expression library was constructed from the purified mRNA by reverse transcriptase synthesis followed by insertion of the resulting cDNA clones in Lambda ZAP using a ZAP Express cDNA Synthesis Kit (Stratagene), according to the manufacturer's protocol. The resulting cDNAs were packaged using a Gigapack II Packaging Extract (Stratagene) using an aliquot (1-5 μl ) from the 5 μl ligation reaction dependent upon the library. Mass excision of the library was done using XL1-Blue MRF′ cells and XLOLR cells (Stratagene) with ExAssist helper phage (Stratagene). The excised phagemids were diluted with NZY broth (Gibco BRL, Gaithersburg, Md.) and plated out onto LB-kanamycin agar plates containing X-gal and isopropylthio-beta-galactoside (IPTG).

[0091] Of the colonies plated and picked for DNA miniprep, 99% contained an insert suitable for sequencing. Positive colonies were cultured in NZY broth with kanamycin and cDNA was purified by means of alkaline lysis and polyethylene glycol (PEG) precipitation. Agarose gel at 1% was used to screen sequencing templates for chromosomal contamination. Dye primer sequences were prepared using a Turbo Catalyst 800 machine (Perkin Elmer/Applied Biosystems Division, Foster City, Calif.) according to the manufacturer's protocol.

[0092] DNA sequence for positive clones was obtained using a Perkin Elmer/Applied Biosystems Division Prism 377 sequencer. cDNA clones were sequenced first from the 5′ end and, in some cases, also from the 3′ end. For some clones, internal sequence was obtained using either Exonuclease III deletion analysis, yielding a library of differentially sized subclones in pBK-CMV, or by direct sequencing using gene-specific primers designed to identified regions of the gene of interest.

[0093] The determined cDNA sequences were compared to known sequences in the EMBL database (up to mid-July 1999) using the computer algorithms FASTA and/or BLASTN. Multiple alignments of redundant sequences were used to build up reliable consensus sequences. The determined cDNA sequences are provided in SEQ ID NOS: 1-331, 1183-1536, 1896-1901, 1905, 1906, 1908-1910, 1932-1968, 2001-2036, 2074-2079 and 2104. Based on similarity to known sequences from other plant species, the isolated DNA sequences were identified as encoding transcription factors, as detailed in Table 1 above. The predicted amino acid sequences corresponding to the DNA sequences of SEQ ID NOS: 1-331, 1896-1901, 1905, 1906, 1908, 1909, 1910, 1932-1968, 2001-2036, 2074-2079 and 2104 are provided in SEQ ID NOS: 592-922, 1914-1919, 1923, 1924, 1926-1928, 2108-2142, 2175-2210, 2247-2252 and 2276, respectively.

### EXAMPLE 2

### Isolation and Characterization of cDNA Clones from Pinus radiata

[0094] Fourteen Pinus radiata cDNA expression libraries (prepared from either shoot bud tissue, suspension cultured cells, early wood phloem (two independent libraries), fascicle meristem tissue, male strobilus, root (unknown lineage), feeder roots, structural roots, female strobilus, cone primordia, female receptive cones and xylem (two independent libraries)) were constructed and screened as described above in Example 1.

[0095] DNA sequence for positive clones was obtained using forward and reverse primers on a Perkin Elmer/Applied Biosystems Division Prism 377 sequencer and the determined sequences were compared to known sequences in the database as described above.

[0096] Based on similarity to known sequences from other plant species, the isolated DNA sequences (SEQ ID NOS: 332-591, 1537-1894, 1895, 1902-1904, 1907, 1911, 1912, 1931, 1969-2000, 2037-2073, 2080-2103, 2105 and 2106) were identified as encoding transcription factors as detailed above in Table 1. The predicted amino acid sequences corresponding to the DNA sequences of SEQ ID NOS: 332-591, 1895, 1902-1904, 1907, 1911, 1912, 1931, 1969-2000, 2037-2073, 2080-2103, 2105 and 2106 are provided in SEQ ID NOS: 923-1182, 1913, 1920-1922, 1925, 1929-1930, 2107, 2143-2174, 2211-2246, 2253-2275, 2277 and 2278, respectively.

### EXAMPLE 3

### Use of a Myb Transcription Factor Gene to Modify Gene Expression in Plants

[0097] Transformation of tobacco plants with a Eucalyptus grandis Myb transcription factor gene is performed as follows. Genetic constructs comprising sense and anti-sense constructs containing a DNA sequence including the coding region of the Myb transcription factor of SEQ ID NO: 2076 are constructed and inserted into Agrobacterium tumefaciens by direct transformation using published methods (see An G, Ebert P R, Mitra A, Ha S B, “Binary vectors,” in Gelvin S B and Schilperoort R A, eds., Plant Molecular Biology Manual, Kluwer Academic Publishers: Dordrecht, 1988). The constructs of sense DNAs are made by direct cloning from PBK-CMV plasmid by cloning cDNA insert into pART7 plasmid, which is then cut by NotI enzyme and 35S-Insert-OCS 3′ UTR put into pART27 plant expression vector (see Gleave, Plant Molecular Biology 20:1203-1207, 1992). The presence and integrity of the transgenic constructs are verified by restriction digestion and DNA sequencing.

[0098] Tobacco (Nicotiana tabacum cv. Samsun) leaf sections are transformed with the sense and anti-sense constructs using the method of Horsch et al. (Science 227:1229-1231, 1985). Arabidopsis thaliana (ecotype: Columbia) whole plants are transformed with the sense and anti-sense constructs using either the vacuum infiltration (Bechtold et al., C.R. Acad. 316:1194-1199, 1992), or floral dip (Clough and Bent, The Plant Journal 16:735-743, 1998) procedures. Transformed plants containing the appropriate construct are verified using Southern blot experiments. Expression of the Eucalyptus Myb transcription factor gene in transformed plants is confirmed by isolating total RNA from each independent transformed plant line created with the Myb transcription factor gene sense and anti-sense constructs. The RNA samples are analyzed in Northern blot experiments to determine the level of expression of the transgene in each transformed line. The expression level of the Myb transcription factor, encoded by the Eucalyptus Myb transcription factor gene and by the endogenous Myb transcription factor gene, for each transformed plant line created with the sense and anti-sense constructs is compared to that of wild-type control plants.

[0099] To circumvent potential lethal phenotypes commonly observed with the ectopic constitutive expression of transcription factors in planta, constructs expressing the 5′ terminal DNA binding domains of MYB transcription factors (MYB TF) can be generated, under the control of either a constitutive or cell-specific promoter. It is hypothesized that ectopic expression of the truncated MYB TF creates an in planta competitive scenario for the endogenous MYB TFs and transgene product. Binding of this DNA binding domain product, with no associated activation domain, inhibits, or severely reduces, both the ability of the endogenous TF to bind to the appropriate cis-element and inhibits transcriptional activation of the downstream gene, resulting in a knock-out like phenotypic effect.

[0100] The Eucalyptus grandis transcription factor given in SEQ ID NO: 2076 shares amino acid sequence identity with MYB transcription factor genes from other plant species. This gene was identified from a cDNA library derived from Eucalyptus grandis floral buds. Analysis of the amino acid sequence using publicly available tools such as PROSITE and InterPro, readily identified putative DNA binding domains present in SEQ ID NO: 2076 (see Jin and Martin, Plant Mol. Biol. 41:577-885, 1999). The amino acid sequences of the identified DNA binding domains are given in SEQ ID NO: 2346 and 2347.

[0101] The adjacent putative DNA binding domains were amplified as a single fragment by polymerase chain reaction (PCR) (Forward primer 5′ CGTCTGTCTAGAAACAAGCTGAACATGGACAAGAAGC 3′ (SEQ ID NO: 2369) and Reverse primer 5′ TGGCCTTCTAGACTAGCTCTGACCAGAGAAA 3′ (SEQ ID NO: 2370)) with the aim of adding XbaI restriction sites on both the 5′ and 3′ termini to facilitate cloning using conventional restriction enzyme-based protocols, and a termination codon (TAG) to the 3′ terminus only. These primers amplified nucleotides 21 to 424 of SEQ ID NO: 2076. The resulting DNA binding domains fragment was cloned into the pART7/pART27 plant binary vector system (Gleave, Plant Mol. Biol. 20:1203-1207, 1992) for expression in planta under the 35S constitutive promoter.

[0102] The binary vectors were introduced into Arabidopsis thaliana by Agrobacterium tumefaciens-mediated transformation using standard floral dip procedures, as described for Arabidopsis thaliana (Clough and Bent, Plant J. 16: 735-743, 1998).

[0103] Phenotypic analysis of the resulting T2 plant translines (Table 1 below) showed that down-regulation of MYB TF activity in planta, associated with the over-expression of the DNA binding domains (sense orientation), resulted in a dwarfed phenotype (approximately 40% decrease in height compared to wild type (WT) or pART27 empty vector control), with spindly inflorescence bolts. Floral development and maturation were unaffected at the temporal level. However, evidence of floral aberrations was observed in lines displaying severe growth retardation. Gross phenotypic analysis of the other translines yielded no significant phenotypes compared to wild type or pART27 empty vector control, indicating that this observed phenotype is due to the sense expression of the DNA binding domains as hypothesized. The T2 observations were made from 15 plants from 5 independent transformation lines per construct.

TABLE 3
Phenotypic analysis of 35S::E. grandis MYB TF DNA binding domain or entire ORF

| | | | | Plant | Histological | |
|---|---|---|---|---|---|---|
| Construct | Description | Line | Plant | Phenotype | Phenotype | PCR data |
| MW2 | DNA Binding | 2 | 2 | Dwarf with | Decreased | Sense orientation of |
| | Domain (Sense) | | | spindly | number of | DNA Binding |
| | | | | inflorescence | liginfied cells | Domains verified |
| | | | | bolt. | associated | |
| | | | | | with cellular | |
| | | | | | collapse | |
| MW2 | DNA Binding | 2 | 3 | Dwarf with | Collapsed | Sense orientation of |
| | Domain (Sense) | | | spindly | lignified cells | DNA Binding |
| | | | | inflorescence | | Domains verified |
| | | | | bolt. | | |
| MW2 | DNA Binding | 2 | 4 | Dwarf with | Not tested | Sense orientation of |
| | Domain (Sense) | | | spindly | | DNA Binding |
| | | | | inflorescence | | Domains verified |
| | | | | bolt. | | |
| MW2 | DNA Binding | 2 | 9 | Dwarf with | Decreased | Sense orientation of |
| | Domain (Sense) | | | spindly | number of | DNA Binding |
| | | | | inflorescence | lignified cells | Domains verified |
| | | | | bolt. | associated | |
| | | | | | with cellular | |
| | | | | | collapse | |
| MW2 | DNA Binding | 2 | 11 | Dwarf with | Not tested | Sense orientation of |
| | Domain (Sense) | | | spindly | | DNA Binding |
| | | | | inflorescence | | Domains not |
| | | | | bolt. | | verified |
| MW7 | DNA Binding | 1 | 7 | Normal WT | No vascular | Antisense |
| | Domain | | | | perturbation | orientation of DNA |
| | (Antisense) | | | | | Binding Domains |
| | | | | | | verified |
| MW7 | DNA Binding | 1 | 8 | Normal WT | Putative | Antisense |
| | Domain | | | | ectopic | orientation of DNA |
| | (Antisense) | | | | lignification | Binding Domains |
| | | | | | | verified |
| MW7 | DNA Binding | 1 | 13 | Normal WT | Not tested | Antisense |
| | Domain | | | | | orientation of DNA |
| | (Antisense) | | | | | Binding Domains |
| | | | | | | verified |
| MW7 | DNA Binding | 1 | 14 | Normal WT | Putative | Antisense |
| | Domain | | | | ectopic | orientation of DNA |
| | (Antisense) | | | | lignification | Binding Domains |
| | | | | | | verified |
| pART27 | Empty Vector | na | 1 | Normal WT | No vascular | Kan DNA verified |
| | control | | | | perturbation | |
| pART27 | Empty Vector | na | 3 | Normal WT | No vascular | Kan DNA verified |
| | control | | | | perturbation | |
| pART27 | Empty Vector | na | 5 | Normal WT | No vascular | Kan DNA verified |
| | control | | | | perturbation | |
| pART27 | Empty Vector | na | 10 | Normal WT | No vascular | Kan DNA verified |
| | control | | | | perturbation | |

[0104] Histological analysis of tissue from plants transformed with the 35S::MYB DNA binding domains (sense orientation) constructs stained with Phloroglucinol and Maules showed aberrations in the morphology and lignification of the vascular structures, with obvious xylem cell collapse when compared with the controls that were transformed with empty vector. Inflorescence bolt sections from plants transformed with the DNA binding domain of SEQ ID NO: 2076 were determined to have reduced cell population in the vascular bundle and an overall reduced gross size of the vascular bundle per se.

[0105] The histological data showed that introduction of the binding domains of SEQ ID NO: 2076 (in sense orientation) resulted in the pertubation of vascular structure development. Further analysis of the T3 generation of the MW2 line 2 (15 individual progeny) indicated that the aberrant phenotype was stably inherited, with 11 of the 15 plants analyzed exhibiting a spindly phenotype.

[0106] These studies demonstrate that the sequence of SEQ ID NO: 2076 encodes a transcription factor and that the introduction into a plant of genetic constructs containing the binding domains of SEQ ID NO: 2076 in a sense orientation may be successfully employed to modify the phenotype of the plant.

[0107] SEQ ID NOS: 1-2370 are set out in the attached Sequence Listing. The codes for nucleotide and amino acid sequences used in the attached Sequence Listing, including the symbols “n” and “Xaa”, conform to WIPO Standard ST.25 (1998), Appendix 2, Table 1.

[0108] Although the present invention has been described in some detail by way of illustration and example for purposes of clarity of understanding, changes and modifications can be carried out without departing from the scope of the invention which is intended to be limited only by the scope of the claims.

1. An isolated polynucleotide comprising a sequence selected from the group consisting of: consisting of: SEQ ID NO: 1-591, 1183-1912 and 1931-2106.

2. An isolated polynucleotide comprising a sequence selected from the group consisting of:
(a) complements of a sequence of SEQ ID NO: 1-591, 1183-1912 and 1931-2106;
(b) reverse complements of a sequence of SEQ ID NO: 1-591, 1183-1912 and 1931-2106; and
(c) reverse sequences a sequence of SEQ ID NO: 1-591, 1183-1912 and 1931-2106.

3. An isolated polynucleotide comprising a sequence selected from the group consisting of:
(a) nucleotide sequences having at least 75% identity to a sequence of SEQ ID NO: 1-591, 1183-1912 and 1931-2106;
(b) nucleotide sequences having at least 90% identity to a sequence of SEQ ID NO: 1-591, 1183-1912 and 1931-2106;
(c) nucleotide sequence having at least 95% identity to a sequence of SEQ ID NO: 1-591, 1183-1912 and 1931-2106;
(d) nucleotide sequences that hybridize to a sequence of SEQ ID NO: 1-591, 1183-1912 and 1931-2106 under stringent hybridization conditions;
(e) nucleotide sequences that are 200-mers of a sequence of SEQ ID NO: 1-591, 1183-1912 and 1931-2106;
(f) nucleotide sequences that are 100-mers of a sequence of SEQ ID NO: 1-591, 1183-1912 and 1931-2106;
(g) nucleotide sequences that are 40-mers of a sequence of SEQ ID NO: 1-591, 1183-1912 and 1931-2106; and
(h) nucleotide sequences that are 20-mers of a sequence of SEQ ID NO: 1-591, 1183-1912 and 1931-2106; and
(i) nucleotide sequences that are degeneratively equivalent to a sequence of SEQ ID NO: 1-591, 1183-1912 and 1931-2106,
wherein the isolated polynucleotide encodes a transcription factor.

4. An oligonucleotide probe or primer comprising at least 10 contiguous residues complementary to 10 contiguous residues of a sequence of SEQ ID NO: 1-591, 1183-1912 and 1931-2106.

5. An isolated polypeptide encoded by a polynucleotide according to any one of claims 1-3.

6. An isolated polypeptide comprising an amino acid sequence selected from the group consisting of: SEQ ID NO: 592, 594-850, 852-930, 932-951, 953-1046, 1048-1182, 1913-1930, 2107-2293 and 2296-2368.

7. An isolated polypeptide comprising an amino acid sequence selected from the group consisting of:
(a) sequences having at least 75% identity to a sequence of SEQ ID NO: 592, 594-850, 852-930, 932-951, 953-1046, 1048-1182, 1913-1930, 2107-2293 and 2296-2368;
(b) sequences having at least 90% identity to a sequence of SEQ ID NO: 592, 594-850, 852-930, 932-951, 953-1046, 1048-1182, 1913-1930, 2107-2293 and 2296-2368; and
(c) sequences having at least 95% identity to a sequence of SEQ ID NO: 592, 594-850, 852-930, 932-951, 953-1046, 1048-1182, 1913-1930, 2107-2293 and 2296-2368,
wherein the isolated polypeptide functions as a transcription factor.

8. An isolated polynucleotide that encodes a polypeptide according to any one of claims 6 and 7.

9. A genetic construct comprising a polynucleotide according to any one of claims 1-3.

10. A transgenic cell comprising a genetic construct according to claim 9.

11. A genetic construct comprising, in the 5′-3′ direction:
(a) a gene promoter sequence;
(b) a polynucleotide sequence comprising at least one of the following: (1) a polynucleotide coding for a polypeptide comprising a sequence of 592, 594-850, 852-930, 932-951, 953-1046, 1048-1182, 1913-1930, 2107-2293 and 2296-2368; and (2) a polynucleotide comprising a non-coding region of a polynucleotide of any one of claims 1-3; and
(c) a gene termination sequence.

12. The genetic construct of claim 11 wherein the open reading frame is in a sense orientation.

13. The genetic construct of claim 11 wherein the open reading frame is in an antisense orientation.

14. A transgenic plant cell comprising a genetic construct of any one of claims 9 and 11.

15. A plant comprising a transgenic plant cell according to claim 14, or fruit or seeds or propagules thereof.

16. The plant of claim 15 wherein the plant is a woody plant.

17. The plant of claim 16 wherein the plant is selected from the group consisting of eucalyptus, pine, acacia, poplar, sweetgum, teak and mahogany species

18. A method for modifying gene expression in a plant comprising stably incorporating into the genome of the plant a genetic construct according to any one of claims 9 and 11.

19. The method of claim 18, wherein the plant is a woody plant.

20. The method of claim 18, wherein the plant is selected from the group consisting of eucalyptus, pine, acacia, poplar, sweetgum, teak and mahogany species.

21. A method for producing a plant having modified gene expression comprising:
(a) transforming a plant cell with a genetic construct according to any one of claims 9 and 11 to provide a transgenic cell; and
(b) cultivating the transgenic cell under conditions conducive to regeneration and mature plant growth.

22. The method of claim 21 wherein the plant is a woody plant.

23. The method of claim 21 wherein the plant is selected from the group consisting of eucalyptus, pine, acacia, poplar, sweetgum, teak and mahogany species.

24. A method for modifying the activity of a polypeptide in a plant comprising stably incorporating into the genome of the plant a genetic construct according to any one of claims 9 and 11.

25. The method of claim 24 wherein the plant is a woody plant.

26. The method of claim 24 wherein the plant is selected from the group consisting of eucalyptus, pine, acacia, poplar, sweetgum, teak and mahogany species.

27. An isolated polypeptide comprising a DNA-binding domain, wherein the DNA-binding domain comprises an amino acid sequence selected from the group consisting of SEQ ID NO: 2279-2293 and 2296-2368.

The application's sequence listing, which the Patent Office published only in electronic form, follows.

SEQUENCE LISTING (2370 sequences)

SEQ ID NO: 1 - DNA, 396 bp, Eucalyptus grandis
tctctctccgttcccctctctctctctctctctctctctctctagacaataagggggcattcaaagctctgtgctttccaccgaaaggactccagcagaaaggactcgtcgtcatgggcgagagagatgatctgggcttgagcttgagcctgagcttccctcagggtcacctgcatcagcagcagcagcagcagcagcagcagtccctgcagctgaacctcatgccctccttggtcccgtcctctgcttcgtctgctcaatctgggttcaatcttcagaagcgctcctgcaacgacgccttcccttcttcttcagatcggaactccgaggcgcgatcgttcctccgggggatcgacgtgaacagagagccgtcggcgggggcggcggcggactacg

SEQ ID NO: 2 - DNA, 725 bp, Eucalyptus grandis
ggacaaggcaaggttggtgcaggaaactggcttgcaattaaagcagataaacaactggtttatcaaccagaggaagagaaactggcacagtaacccgtccacctctactgtcctgaagagcaagcgcaaaaggtaattatattaagccagtgagtgaattaacttgattcttctagagcttctcaccaactaaaaattcaaaatgaagtaatgcaggtgaaaatagcagtgaccgcttcatgtagattaaggaaaattgtaaactaaactccttccgagtcgtgcatgtgctcatgatccagtggcacatatggttggtggcaaatgaagcgcgaatttcttttgattctgtagaggaagagcctaacatagatgagaaaaatctgcccactttctgctgctgtaaaggaaccacaaactaaattcggagggcagatccaaaacttatacccgcatcacgtggaagtcctggaataaagattgctgtctcgtaaattatgtgaaacgattctgctgcatcggctgatgggtgtaatttttgtttaccatattcatatatgtgaataagtacagagaagggttgtgggtgtatagtacaatagctctcgtttagttccatacacgtatagtagatagagattatagcatgttaggtgttgtcatttctactgtagtgtacgcttgtgaagcaaatgtagcttggtcttgattaacaaaaaaaaaaa

SEQ ID NO: 3 - DNA, 875 bp, Eucalyptus grandis
ctggagagccactttggatcaggagcgttgagaccggccgtgagatacttaactatgacgagtacgtgaaggagttcaaggtcgaagcccctagtgagggccggcccaagagatctatcgaagcctcgagagagactggggtcgtgttcgtcgacctcccccgcctcgtgcaaagtttcatggacgtgaatcaatggaaggaaatgtttccttgcatgatctcaaaggcagcaactgtggatgtggtttgcagcggtgaaggtcccaacagaaacggcgccgtgcaattgatgttcgcagagctgcaaatgctaacgccaatggtgcccacgagggaggtgtacttcatcagatactgcaagcagctcagcgcagagcagtgggccttagttgatgtctccatcgaaaaagtcgaagataacatcgacgcctctcttgtgaaatgcaggaaacgcccctccggctgcatcatcgaggataaatccaacggccattgtaaggtaatctgggtagaacacttggagtgccagaaaaccaccgttcatcccatgtaccgtaccatcgttaacagcggcctagcctttggcgcaagacactggatgacgacactgcaagtccagtgcgagcggctcgttttctttatggcgactaatgttccaaccaaagattcgaatggtgtcgccacacttgcaggaaggaagagcattttgaggctggcacagaggctgacacaaagcttttgtcaggccattggagcatcgagctatcacagctggaccaaggtcccaactaaaactggagaggacattagggtggcttctaggaaaaatctgaatgatcctggagagcctcttggggtgatcctatgcgcagtt

SEQ ID NO: 4 - DNA, 78 bp, Eucalyptus grandis
aatgcaggcggtgatgaccggctgtgactctagcaacatagccgctctgccatccggtttctcgatcctgcccgatgg

SEQ ID NO: 5 - DNA, 791 bp, Eucalyptus grandis
acaaaatggtccaagcatgcctccagtacagccttttgtccgagcagagatgctccctagtggctacttggtacgtccatgtgaaggtggtggttcaatcatacgcattgttgatcacttggatctagagccatggagtgtgcctgaagtactgcgaccattgtatgagtcctccacaatgcttgctcagaagacgacaatggcagctctgcgacagctgaggcagatagctcaggaagtttcacagcctaatgtttctggctggggaaggcgacctgcagcacttagagctcttagccagaggttaagcaggggatttaatgaggctcttaatggatttactgatgaaggatggtcgatcatggggaatgatggcattgatgatgtcactattctcgtgaattcatcccctgacaagctaatgggattgaatctttcgttttcaaatggattcccagctgtgagcaacgctgttctatgcgcgagggcctctatgctcttgcagaatgtgcctcctgcagtcctccttcgcttccttcgtgagcacaggtcagaatgggctgacaacagtattgatgcatactcagccgcagcagttaaagttggttcctgtgctttacctggatcacgtattgggagtttcgggggtcaggttatacttccacttgctcatactattgagcatgaagagttcttggaggtcatcaaattagaaggtatgggccactctccagaagatgccttaatgcctagagatatatttttcctgcaaatgtgcagtggagtggatg

SEQ ID NO: 6 - DNA, 403 bp, Eucalyptus grandis
gtgccctatcgattcgggccgctccttcgacacgagccttagtctcggtttaggctgttatggggatcctgaagatcacgagatcaagatcaagaaaccgctcgcgaagctcagtggtaactccacgtgcctcacgataggcttgcccggcggggaggcgtgcgggctgggatccgcgagtggggacgaggtcaggaacatcccgagcaggtcggcatcgtcgttctcaaactcaagcagtgcgaagagggagaaggcggagcaaggagaggaagaagcggttgagagagggacgggctcgccgagggcgactatcaatatcgaagatgaagatgagttcagccccaggaagaagctcaggctttctaaagcacaaagttccattttggaagagatgcttcaa

SEQ ID NO: 7 - DNA, 955 bp, Eucalyptus grandis
gaaaattcaatacgctaccttgcttcgaccgaagtcctctccctctctctctctctagacatattcaaatccgattctctctctagcctccccgtcgccgctgtcgtcgccggtcgccgtcgccgtcgcagagccgcggaggaggagagggagagagagagagagagcggagagacgccggtgcggggatggggcagcagtcgctgatctacagcttcgtggcgcgggggacggtgatcctggcggactacacggagttcaccggcaacttcaccagcgtcgccttccagtgcctccagaagctccccgccaccaacaacaagttcacctacagctgcgacggccacaccttcaacttcctcgtcgacgacggcttcacatactgtgtggtggccgttgaatctgtcggtcggcaagttccaattgctttccttgagcgagtcaaggatgattttacaaagagatatggcggtggaaaagctgcaactgcagttgccaaaagcctaaacaaggaatttgggtccaaattgaaggagcagatgcagtactgtgtggatcatccagaggagatcagcaagcttgctaaagtaaaagcccaggtttcagaagtaaaaggagttatgatggaaaatatcgagaaagttcttgatcgtggagagaaaattgagcttctggtcgacaaaactgagaacctccgatcccaggcacaagatttcaggcagcagggtactcagatcagaaggaagatgtggctgcagaacatgaagatcaagctgatcgtactcggcattttgatcgctttgattctcatcatcgtcttatccatttgtggcaatggcaaatgtaaataaattttggagctttggagagattgcattaatttcaagtcacacacactatggacgcgtgttctatatgacagtatttaattgctgtgtaaaaaaaaaaaaaaaaa

SEQ ID NO: 8 - DNA, 666 bp, Eucalyptus grandis
gaagagaaaaaagaggagcctccggctccaataacagtcgtgttgaaggttggaatgcattgcgaagcatgcactcgagttttgcggaaacgaatccggaaaattaaaggagtagagacagtggagaccgacgtggtgaatgaccgggtaatagtcaaaggtgtggtcgacccgccgaagctggtcgcatacgtgaaaaagagaacggggaagcaagcgtcgattgtgaaggaagaggagaagaaggaagaggagaagaaggaagaggcgaagaaggaggaaagcaaagaaggagagaagaaggacggcgaggaagggaaggacgaggacggctcgaagatggacataaagaagaacgagtactggccctccaggccttacatggaatatcaaatgtacccaacccagatcttcagcgatgagaacccgaacgcttgctccgtgatgtagtgtgatgtagtgctgagagtttccaacctcggccccagttaagagtacgtgtcgaggcaattttccattgtacttaaagattgctaataaacagattcgcgagaccgggagtcgttggctaattgtaatccgttgatgttctgtaatctgtgttaccaattgtctactctcttaatgtgaaagtgtagatgaattttcagtaaaaaaaaaaaaaaa

SEQ ID NO: 9 - DNA, 352 bp, Eucalyptus grandis
cctcgtccccaaggtttttttgcggcagtatggagttcccgagtgaattttcagaggcctcttcacagaagagaatcggggggagagggaaaatagagatcaaacggatcgagaacacgacgaaccggcaggtcaccttttgtaaacgccggaacgggttgttgaagaaggcttatgagctatcggtgttgtgcgatgctgaagtggcgcttattgtcttctcgagccgtggcaggctctatgaatatgctaacaacagtgtcagaggaacaattgagaggtacaagaaagcaagcagtgattcctcacatccacagtccgtttctgaagtgaacactcagttttatccagc

SEQ ID NO: 10 - DNA, 989 bp, Eucalyptus grandis
gaggagatggcgagggggaagatccagatcaagctgatagagaacacgacgaaccggcaggtgacctactcgaagcgacggaacgggctcttcaagaaggcgaacgagctcaccgtcctaggcgaccccaaggtctccatcatcatgatctccagcaccggcaagctccacgagtacatcagcccctccacctcaacgaagaagatgtacgatcagtatcagcaggcgctcgaggttgatctctggagctctcactatgagaagatgcaagagaacctgaggaagctgaaggaggtgaacaagaagcttcagctggaggtcaggaggaggttcggggaaggactgaatggtatgagcttatcggaattgtgcggtcttgagcaagatatggacaacgccgttagcctgatccgtgaacggaagtacaagacgctcggcaatcaaatcgacaccgccaggaagaagaaaaagaatgctgaggaaataaacaaaagtctcctgcaagactggaccaatctgatcaagcatctgagggaggacgacccgcacttcggaatggtcgacaacggcagggattacgaggctgtgatcgggtatacagacgccgccgccgccgctcgcttgtacaccctgcgcctgcaaccggaccagcccaatcttactagcggaggaggatcggagatcacgacctaccctttgctcgagtgagacgaaggcgtcggaaacccttccgacgtcctcatattgtctattcattctgtctaagggccgattccatctggaatcctgacttcattggtatgtcgaagtttaggactttgttatgtcatcctattcagcagctaagtttgttcttatcagaagctgttcctattatggaccgagggcgatttcctctagggcatcatgtgttttaagacaagtctatatataagactactttaaaacaatcgaatgagttggtgcaaaaaaaaaaaaaaaaaaaaaaa

SEQ ID NO: 11 - DNA, 526 bp, Eucalyptus grandis
agaaaatacagaaatctcagcacgatccccatctcctccttcgccaaagtcgttgggaacttccccccttctccctctcgctccgtccacgaagcaagcaagctctccgcgaagatcccttccttgttgttaccaaattggttgaagcttcttgtgggttgctggacctgcagattttggttaataaatgagtcagaagggccttatatatagctttgtggcgaaagggactgttgttctggccgagcacacgcaattttcgggaaactttagtactattgctgtgcagtgcttgcagaagctgccttctaatagcagcaagtacacatactcctgcgatgggcacacatttaacttcctaacggatagtggatttgttttcctggttgttgctgatgagtccgtcggaagaagtgtgcctttcgtgtttcttgagcgagtgaaggatgactttatgcagcattatagtgccagcattgcaagtggcgacccacatccacttgcagatgatgatgaggatgacgat

SEQ ID NO: 12 - DNA, 342 bp, Eucalyptus grandis
agagagtaatggggagagggagagtggagctgaagaggatagagaacaagatcaacaggcaggtgaccttctcaaagaggaggaatgggctgttgaagaaggcctatgagctctctgtgctgtgtgatgttgaggtcgcgctcctcatcttctccagccgtggcaagctctatgagtttggcagcgctggcccttctggcataaataagacgcttgaacgataccaacgtgacaacttcactcctcaagacaacgttgctgaacatgagacacaacagaactggtttcaagagatatcaaaattgaaggcaaaatatgaactcttcaacaaactccagaagc

SEQ ID NO: 13 - DNA, 197 bp, Eucalyptus grandis
gcctgcttcaaaaatcatctcaggaggaagacaaagcaaggctagtacaagacacgggcttgcaattgacacagattaataattggtttataaaccaacggaaaagaaattggcacagcaacccttcgtcttccacagttcccaagagcaaacgcaagagaagccatgcaggtgatccggataaagagagacctatg

SEQ ID NO: 14 - DNA, 182 bp, Eucalyptus grandis
tgtatagaaacaaaagcacgatttggaaaatcggttgaatctccggccacggacaagtggaaagtgtggttccagaataggagagccaggactaaattaaaacaaactgccgtagagtgcgagatgctgcagaaatgctgcgaaaccctaaaagaagcgcacagcaggttgcagaaggagtt

SEQ ID NO: 15 - DNA, 983 bp, Eucalyptus grandis
ggcttccctttcttatcctccattctcctctctccttctccttacactcacagacacaatcacagagagagagagagagagagagagagagagagagagagaatggcattcgcaggaacaacccagaagtgcatggcctgtgagaagacagtctatctggtggacaagctcacagctgacaatagaatctaccacaaggcctgcttcagatgccaccattgcaaagggactctcaagcttgggaactataattcatttgaaggagtcttgtactgccggccgcatttcgatcagctcttcaagagaactggcagcctcgaaaaaagctttgaaggaacccccaagattgcaaagccagagaaacccgtcgatggagagagacctgcagcgaccaaagcctccagtatgttcgggggaacgcgagacaaatgtgtaggctgtaagagcaccgtctacccgaccgaaaaggtgacggttaatgggactccataccacaagagctgcttcaaatgcacccacggggggtgcgtgatcagcccatccaactacgtcgcgcacgaggggaaactctactgcaggcaccaccacactcagctcataaaggagaagggcaatctcagccaactcgagggcgatcatgagagggaaacaatggctcctgaatcataaaacgctttgatcttgcactaccttgttcgttgagctgtcaccacactttgtggccagcggatttcaggctggtccaaaaacctgttatgctattagagaatctatgtccatctactaaatttgagatgtgtgagccttgaccggtttgatttggcttctgttttgcgattgcggatgatttctcgggttggttgtaagcgtagaataagtggtgcttgcttcttgactttgtgaaacctctgagcttgctttcttttcagtcttgtccagcgagtgtgtctagcatcatccctatttttcaaaaaaaaaaaaaa

SEQ ID NO: 16 - DNA, 397 bp, Eucalyptus grandis
catttggtaagatatttgaagagtcagtccgcaaagaattgtcccccgagtttgccaagttaatgcaagaggggtctgcctacttgccctctggaatttgcatgtcgacgatggggcgacatgtctcatatgaacaagcgatcgcgtggaaggtcctttctgcggaggagaacactgtccactgcctcgcttctctttcgtgaattggtctttcgtgtgagcatagcctaatatattctttttttgacgccctcttgctgctgttgaatagatgtgaaaaaactaagaggggttaggagttttgtcatactgaaaaagaaaagaaagaacacatccaattccccaattttttatttaatgaaaatttccatgtgatgtgcaaaaaaaaaaaaaaaaa

SEQ ID NO: 17 - DNA, 60 bp, Eucalyptus grandis
atgatggaaatattgagaaggttcttgatcgtggtgaaaaaatcgaacttctggttgata

SEQ ID NO: 18 - DNA, 60 bp, Eucalyptus grandis
agacagtcaatcttcgttctcaggctcaagacttcaggcagcagggacccaaaatgcgac

SEQ ID NO: 19 - DNA, 60 bp, Eucalyptus grandis
gaaaaatgtggctgcagaacatgaaaatagaagctgacttagttctgggcattattattg

SEQ ID NO: 20 - DNA, 48 bp, Eucalyptus grandis
ctttgattctggtcattgtttatctgttttgtcatggcttcaattgtg

SEQ ID NO: 21 - DNA, 766 bp, Eucalyptus grandis
tctgcagcatcattaaaagctagtccatttggctatcctggtatgaggcccacaagattcaccgggagtcaaatcatcatgccccttggtcacacaattgagcacgaagagatgcttgaagttatccgtcttgaaggccattctcttgctcaagaagatgcttttgtatcaagagatattcatcttttgcagatatgcagcgggatagacgagaatgcagttggagtctgttccgaacttatttttgcgccaattgatgaaatgtttcctgatgatgctccactgctaccctctggtttccgtatcataccactggattcaaaatcatctgatgtacaggattctctaacgacaaatcggacccttgatctgacatcgagtcttgaggtggggcctgcatcaacaaattgcgttggagatgttgcgccaagccatggtgcacgatctgttctgactatcgccttccagttcccatttgatgccaacacacaggataatgtggcagtcatggccaggcaatatgtccgtagcgttatttcgtctgtgcagcgggttgcgatggtcatatctccatcaggattgggcccttccattaaccccaagctttcacagggatctccagaagctctaacacttgctaactggatctgccagagctacaggcatgttctgataatttgattgaattggtcttcttttggtgcatctcactctgtgtttgttgtgatctgccactcatcaagctgatgctcgactatctctctcc

SEQ ID NO: 22 - DNA, 329 bp, Eucalyptus grandis
atacacaaggagatccacaagtctgggggaatagcacaagaggttgcagctgctgggccttcgtcttcttctggtggcatgaagagatcactggtcttctttttctgcgccaattgatgaaatgtttcctgatgatgctccactgctaccctctggtttccgtatcataccactggattcaaaatcatctgatgtacaggattctctaacgacaaatcggacccttgatctgacatcgagtcttgaggtggggcctgcatcaacaaattgcgttggagatgttgcgccaagccatggtgcacgatctgttctgactatcgccttccagt

SEQ ID NO: 23 - DNA, 954 bp, Eucalyptus grandis
attggaccttgcctcttctcttgagatcgggccagctggaaataggagttttaatgatattaatgctaattctggttgtacgagatcagtgatgactatcgcatttgagtttgcattcgaaagccacatgcaggaacatgtggcctctatggcccgccaatatgtgcgtagtataatatcctcggtgcagagagtggcattggcactctctccttccaatctcggttcacatgctggtctgcgtacacctcttggcactcctgaagcccaaacacttgctcgctggatttgccacagttataggtgctacttgggggtggatcttctcaagtccagcaatgaaggaagtgagttgattctcaagaacctgtggcatcactcagatgctattatgtgctgctctcttaaggccttacccgtattcacgtttgcaaatcaggcaggtctggacatgctcgaaaccaccttggtggcgctgcaagacataaccctggaaaagatttttgatgatcatggccgaaagactctgtgttcagagttcccacaaatcatgcaacagggttttgcttgtcttcaaggtgggatctgcctctcgagcatgggacgaccagtgtcatacgaaagggcagtggcgtggaaagttatgaatgaggaagagaatgcccactgcatctgctttatgttcatcaactggtcttttgtgtgatttctgttgcagaaactaaggtattaagctatgtaagttgtgaagaatgactcttcatctagtgactgctacttcaaactcctatggtctgtgaaccttagaactgatgtgtcctctcttgtttagacgttcgtcatgtggacgcctggtcgatgtcgactcttttgccatgtctgtgtagtggttatgaatggacgtggatgttatgcttggaagtggttgattatcattttcgtgctgtagatgtg

SEQ ID NO: 24 - DNA, 338 bp, Eucalyptus grandis
cagagagagagagagagagagagagagagagagagaatggcatttgcaggaacaacccagaagtgcatggcctgtgagaagacagtctatctggtggacaagctcacagctgacaatagaatctaccacaaggcctgcttcagatgccaccattgcaaagggactctcaagcttgggaactataattcatttgaaggagtcttgtactgccggccgcatttcgatcagctcttcaagagaactggcagcctcgaaaaaagctttgaagggaacccccaagatttgcaaagcccagagaaacccgtcgtggagagagaccttcagcgaccaaaggcttc

SEQ ID NO: 25 - DNA, 338 bp, Eucalyptus grandis
gcggcaaggagcaactaaatgtaacactctgattactagggacctctcattgtctttggatggcatttaaatcaccaggaggaatcacgtggctgaaacatttacttgtgaagaacttttacttaggggagcatctaaaatgcaggaatgggctcatcaagaaggcctacgagctctccgtcctctgcgacatcgacatcgccctcatcatgttctccccctccgaccgcgtgagccacttttcgggaaaaagaaggatcgaggatgtcttgacccgtttcattaacctcaccgaccaagaacgagacactcctagatgtccaggatcggcgcacacg

SEQ ID NO: 26 - DNA, 301 bp, Eucalyptus grandis
caaaccttcccagggtttccatttccatttccttcatagaatgctccgttcctttcttatccctttttgggtactctctgttctcatggtcctttcataaagttttctcatctcttaaccaagactggtaagagagagagagatagagagtttattagtgggtgagggtgttaaaaaatgggaagagggagggttcagctgaagaggatagagaacaaaattaacaggcaagtgaccttttccaagagaaggaatgggctcctcaagaaggcttatgagctctcgctcctctgtgatgctg

SEQ ID NO: 27 - DNA, 188 bp, Eucalyptus grandis
cgagatctccgtcctctgcgacgccgacgtcgccctcatcgtcttctccaccaagggcaagctcttcgagtacgccaccgactgttgcatggagaggatcctcgagcgttatgagagatattcatatgcagagagccaggttctcacaaacaatgccgaaaccaatgggaactggactttggaacatg

SEQ ID NO: 28 - DNA, 261 bp, Eucalyptus grandis
gtgattcctcacatccacagtccgtttctgaagtgaacactcagttttatcagcaagaagcatccaagcttcggagacagataagagaaatccaggtctcagataggcatcttctaggtgagggtataagtgatttgagcttcaaggatctcaagaatctcgagagcaaattagagaaatcgatcagccgtgttagatcaaagaagaatgagatgctttttgccgagattgagtacatgcagatgaggggccttgtgcagg

SEQ ID NO: 29 - DNA, 298 bp, Eucalyptus grandis
gagaactctcgcaatgagtgggatatactttcaaatgggggacaagttcaagaaatggcacacatagcaaatggtcgcgaccctggcaacagcgtctcgttactccgcgtaaataatgcaaattcgagccagagcaacatgcttatactgcaagaaagctgcacagactctgttggtgcttatgtgatctatgctccagttgacattgtcgctatgaatgtcgtattaaatggtggcgaccccgactatgtagcgctgttaccctcaggttttgccatacttcctgatgggccagagt

SEQ ID NO: 30 - DNA, 218 bp, Eucalyptus grandis
cgaccgagcaggtccatttcctcgagaagaacttcgagctggagaacaagctcgagccggagaggaagatccagctcgccaaggacctcggtttgcagccccggcaagtcgcgatatggttccagaaccgccgggcccgatggaagaccaagcacttggagaaggaatacgaagatctgcaagccagctataacagcctcaaggccgactgcgacggc

SEQ ID NO: 31 - DNA, 240 bp, Eucalyptus grandis
aaacaggcaggtgaccttcgctaagaggaggaatgggctgctcaagaaggcctatgagctctctgtcctctgcgatgctgaggtcgccctcattatcttctccacccgcggcaagctctatgagttctgcagcagccctagcatgctcaaaacgctcgaccgttaccaaaagtgcagctatggatccgttgaagttaacaaaccctccaaagaactagagaatgcctaccgggagtactt

SEQ ID NO: 32 - DNA, 1223 bp, Eucalyptus grandis
ggcccctctctctttctctctctctgtgtctgtctttcttgtggatccaccaggctcgtctttaagaatatacagcagcgagcaggcaagacaacgccccatctctcttctctctctctctctctctgtggctctgtctttcttttgtttcttgccgttttggggtgtgtgtgttgggttgtgtgaattggagcgaggatggggagggggagactgcagctgaagaggatagagaacaagatcaaccggcaagtcaccttctccaagaggagggcgggtctgctcaagaaggcccacgagatctccgtactctgcgacgccgaggtcgccctcatcatcttctccgccaagggcaagctcttcgagtactccaccgattcctgcatggagagaattctcgaacgctatgaaagatactcatattcggagcaccaagttcttgcaagtgagacagaatcgattggtagctggactttggagcatgctaagctcaaggccagacttgaagttttacacagaaattataggcatttcatgggagaagatcttgattctttgagtctcaaggacctccaaaatttggagcagcaactggagtctgctcttaaacacataagatcgagaaagaatcagctcatgcatgaatcaatctcagtgcttcagaaaaaggatagggcattgcaggagcaaaacaacctgcttacaaggaaagtaaaggagaaggagagggcactagcgcagcaagctcagtgggagcagcaagaccatgcccttgactcacctgttgttctaccccactacttgccatctctcgacatcaatggctcttatcaagcgagacacaacggacacgatgacggagagaacctgactcagcctcgggctggtacacttcttcctccgtggatgctccaccgtctcaattaaggcttcgacataaagggaaacttctgctgctatatctttgatatgcaattctgaagtccagctgatgaattgcatggcataatctggggctctcccccacccttgttctagcgaaataaacatacctctgctttttgctgcattcagtactcctaagtgtggtcctccgtgtatgtatagcaccattgcaaatatgcataccaatgtacatgtatgcaaaattatatatggaagttaacacaaccataaagcagatggagaagtatattgtttgctagcaaaaaaaaaaaaaaaaa

SEQ ID NO: 33 - DNA, 2148 bp, Eucalyptus grandis
ccgatctctcccaatcccctcctctcactctcccccaaaaaccagtctctggttttcctctctcccctgcacacacacacattctctctcctccttcccaccattattacagaaacagcagactgcgtagtgttgaaaaacttgatccacaattgattgggtaatgatgatgatctagagggagagagagagagagagagagagagagagagagagagagagagagcataaattcagtgcaagcttttgattggtgattggtgacatctcttctgggttgggtttgggtttgtgggtttgggtttgggttggtcttttgcttgtgagagtattattctttcttcaccctctgtgcatgaattttcttgggccatgctcatgcattctcctcctctttcttcatcaccatcgtcatcgtctctggctttgatgggttggcgagggggggagctgagggagagggagaggagaggagagaggagcggctgtgcgttcgcgtgcagggctgcacgaggtgttctcgtttcgggcgcgggcgctctgcttccatggctgcttttaagtaagacgccaaaagaaaacctttttgctctctcgagtgtcatgaactcgcactgaaagtgcgcgccgaaccgagaagaagaagaagaagaagaagaagaagaaagagaaaccatccccttagaaaacgcgaaaaagagtaaatagtaaaaagagcaagcttgatcttacttgatctaaaacattaagatccttctctgttcgagagaagtcacagtcccgctttttccagacatgaagagacttggcagctcagattcgttgggtgctttgatgtccatctgcccaccttcagaggaattgcagcacagtccgagaaacggcaaccccatctaccacagcagggacctgcagtccatgctggagctgggcctcgacgaggaaggctgcgtggaggaccagtccgccggcggcggggggcacgtcggcggcgagaagaagcggcggctgagcatcgaccaggtcaaggccctggagaagaacttcgaggtggagaacaagctcgagccggagcggaaggtgaagctggcccaggagctggggctgcagccgcgccaggtggccgtgtggttccagaaccgccgcgcgcggtggaagacgaagcagctggagcgggactacggcgtgctcaagtccagctacgaggcgctcaagctcagctacgacgccctcaagcacgacaacgaggcccttcacaaggagataaaagagctgaaatcgaaactccgggaagaagacgacaaccccgagagcaatctctccgtcaaagaagaggtcatcatccccggccacgacgtgtcggacaagatccgggccgcagacgacggtgacgacgacaccaaacgctctcctccccctccgatcaccgccccgcctcgcgagctgagcttcaacaatggtgggctgaaggacgggtcgtccgacagtgactcgagtgcaattgtgaacgaagagaacgcggcgaccagcagcagcagcccgaaccccgccgtccagagccacggcggcttcttgaaattcatggggtcatcgtcctcttcggcctccccaccgccgccgccaccggcttccttcggcgggtgcttcagcttccagttccagcgagcgtaccagcctcagcctcagcctcctcaccaccaccaccaccacagtccgtacgtgaagatggaggagcacaatttcctcggcggcgaggaggactgcaacttcttctcccaacaacaagcccccaacccgcaatgggaacgcccccaacaagggaaacgaaggaaaacaaactccccccgtggaaggggactccagattagagatcgataaaaaaaatgtagggcgacaactccctagctttacgtgcttgtgaagtgaaacaaactctcgggcacacgattgcacgaatcacttcaacccggcacgacatgactcgacacgacgagaataagatcgagctagtgagagaagagtttgggcacggagcgacaattcgagtagtatgcagttccttattgcgcgcggcattccggttataggatgcaaattagaattgaatatgatgcgatatggtaatgttttaaaaaaaaaaaaaaaaaa

SEQ ID NO: 34 - DNA, 273 bp, Eucalyptus grandis
gtcttgcgctcggttcttgagctcgttcttgagagctgaacggagacgatgggcgaggaatcgttcatatacagcttcgtggcgagagggacgatgatcttggccgagtacacggagttcacgggcaacttcccggccatagccgctcagtgcctccagaaactcccttcctccaacaacaagttcacctactcctgcgatcaccacaccttcaatttcctcctcgaagatggctacgcttattgtgttgtcgccaaagaatcagtgggccaa

SEQ ID NO: 35 - DNA, 384 bp, Eucalyptus grandis
attccatttagcctctttcctcctcaatcggaagggttcttcaacccaatggacggcaacctctcattgcaaatcggatacaatccgacatgtctggacgagatgaatgcttcggtttcgagccaaaatgttgccggattcattccgggatggatgctttgaacttactacatcgacttggagtgtgaatcgagctggtgaaatttgtgcgcgtgtcccttgtaaaattgcgatccgcaagacaataagtacataatattttggagctgtgatgacataaaaagaggaaggccaccctttcctctctcatgatcagaacttttgataatgtctgtatggcccggcagtgcaattggaacgagctcagctttgcagttcttttcg

SEQ ID NO: 36 - DNA, 238 bp, Eucalyptus grandis
gcaggaggagagcccatgtggattgcaggacccgatggctcttcaagcgtgctgaatgaagacgagtacattcgcgcatttcctcgtgggatcgtaacaaaccccaccggatttaagcgcgaacctcacgacaaaccggggtcatcatcatgaatcacatcaatcttgttgagattctcatggatgtgaaccagtggtccactatattctcaagcatcgtgtcaagagctatgacttt

SEQ ID NO: 37 - DNA, 698 bp, Eucalyptus grandis
gccttggcacgcagattccatcgggaatccatatgccttctgcgaatcttagttccatatcgttcttgggtcctattcccatggtatcgggggatggtggtgggaggaccggttctgagcggtcaagaaacgctgattgtgctccggcaggttttcctggaggtgatgaagatgtgaataagggaggggacattccttatggaatgtcaaccatcgtgagagtcattcccaattctaggtacttgagggtggcgcagcaactgcttgatgaaatagtgaatgtgcgaaaggctttgaagcgctctgatgacgcgaatgaccaatctagacatgagaaccaaaggagccccaaagatgcggatgggggttccaagaacgaagcatcctcaaatccccaagaatccgccagtaactctagcgagctttctgctgctgaaaaacaagatttgcagaacaagctcacgaagctcttgtccatgttggacgaggttgataaaaggtacaagcagtactatcaccaaatgcagatcgtggtacagtcttttgatacaatagcaggaagcggtgcagccaagccctacacggcgcttgcgctccagaggatatcccgccacttccggtgcctgcatgacgcgatcacgggtcaaattcaagcaacccgtaaaagtctcggagagcaagacacctctacagaaacg

SEQ ID NO: 38 - DNA, 277 bp, Eucalyptus grandis
aattcttactgacactccatcaaactggtacaccgcgtcctgaacatttcacccagtggacctcaatgacttgatatcttagaatggatattggaacttataggggttacgtacagacgtcttgatggaagtacccaggtgacggacagacaaagcatagttgacactttcaataatgatacttccatatttgcttgcttgctttcgacgagagctggaggacagggtttgaatttgaccggagctgacacggttgtcatccatgacatgggatttc

SEQ ID NO: 39 - DNA, 225 bp, Eucalyptus grandis
tgttggcaccatgtacacacacagtgtggtaaagcaggctttgggatgctcaagcaagagaatctgagcaatgaactagatagggtcaaaaaggagaacgacaacttgcagattcagctcaggcacctgagaggaagacataacatcactgaaccacagagagctgataatcctagaagacactcttgaaaacggcctcggatgtgtccgagaccagaaggacga

SEQ ID NO: 40 - DNA, 341 bp, Eucalyptus grandis
aggcagcaaagagctcgagtccttggaaagacagctagatgggtcattgaagcagatcagatcacgaagaactcagtacatgttagatcagctgactgatcttcaacatcgggaacagttgctccacgaagcaaacaggaccttgaatcaacggttgatggaaggataccaagtgaatgcgctccagttaaatcaacatgccgaggaagtcggaggatacggtcatccaccgccgccgccactgccgccacagccacttgctcagcctcacagcgaagcttttttcatcccttggaatgtgaacccactttgcaaatgggataccagcccgatccagtgtc

SEQ ID NO: 41 - DNA, 1286 bp, Eucalyptus grandis
ccatcaagctttctttcacaaagagaggggctttcgggagacaagcttcgacggagaagagtctttaacttagcaccaatatagagagcgtcttcaagctcgggtatggtcgagggagaaagaaatggcgatgacgatggtgcctcacagggagagcagcagtggaagcatcaacaagcacttgaccgactcggcaagtacgtgaggtacacagcggagcaagtggaagctctcgagagggtctattcagaatgccctaagcccagctctctgcgcagacaacagctgattcgggagtgtcccattttgtccaacatcgagcctaagcagatcaaagtctggtttcagaatcgcaggtgtcgagagaagcagagaaaagaggcctcaagactccagacggtgaacaggaaactgacggccatgaacaagctcttgatggaggagaatgatcggctgcagaagcaggtttcgcaattggtatgcgaaaatggctacatgcgtcagcaactccatactacatcggctactactaccgatgcaagctgcgactctgtggttactactcctcagcactctctcagagatgcaaataaccctgctgggctcctctccattgcggaggagacattggcggagttcctctccaaggctacaggaactgctgtcgattgggttcaaatgcctgggatgaagcctggtccggattcggttggaatcttcgccatttcacaaagttgcagtggagtggccgctcgagcctgtggtcttgttagtttagaaccaaccaagattgtagagatcctcaaagatcgtacttcatggttccgggactgtcggagccttgaagtcttcaccatgtttcctgccggaaatggtggaacaatcgaacttgtttacacgcagatttatgctccaactactctggctcctgcacgagatttatggactctcagatataccacgactctagaaaatggcagtcttgtggtatgtgagagatctctgtccggatctggtgccggccccaacccagcttcagcagctcaatttgtgagagctgaaattcttcctagtggctatttgattcgcccatgcgagggtggaggatcaatcattcacattgttgaccacctcaatctcgaggcctggagtgttcctgaggttcttcggccactttatgaatcatccaaagttgtggcccagagaattactattgcggctcttcgatacatccggcaaattgctcaggagacgagtggggaggtggtttatggtttgggaaggca

SEQ ID NO: 42 - DNA, 338 bp, Eucalyptus grandis
ctctcttctttctctcttttctctcaagctctctccttcatcttcaagaacacaagaccaaatcaatctcccaccatctcctcaaatgggcatagatgatctgtgcaacacaggccttgttctgagtcttggcctcgagacgcccttcaagatcgaagcccagaggcaagccaaacagcgccttaacttcgagccctctcttacgctgtgcctctccggcacgaccaaagctacccgcgacgagcagcctccggcggaccacttgtatcgccaggcttcgccgcacagccacaacagcctcagcgcggtgtcgtcgttctcgagtccgcgggtgaaga

SEQ ID NO: 43 - DNA, 219 bp, Eucalyptus grandis
ggagagtggtgaagcacggcgacttagagattctctggtggaaatggcaaatgtaggcaagagccctagcatgttgacagagtgtggtcttgcagagaattctctcgtctcaattgcggaaagagtgacacatcatcggtggtcctggtcggaggtcaaatatctctctgattgccatctgatggcactagatgctagcctttagagttgtgtatcgga

SEQ ID NO: 44 - DNA, 310 bp, Eucalyptus grandis
tattctgaagcaagttcagatgagggaaatcagtattctacacgtgaagaggagggagagattgaggagtttgaggaggacacttacagtggtgctcctggagcactaccaatcaacaaagaccagtctgatgaggatgttccggctgaagaatgtgatgagtatccatggacatcagagaggactaggaacaatcatttgccggaagaagccggtttctcaggatcatcggcagacagtcctagaggaatcaggatggcatctccttctgcttcttcacagaaatttggatctttgtctgcattagatt

SEQ ID NO: 45 - DNA, 1043 bp, Eucalyptus grandis
tctctatctctgttctcgaacctctgcggcgaattccttctctctataactgaagagtatgaacgcgccataagcgtcgtcgtcttcgtcgtcatcgtcatcatcaacgggattcctcccatcgcccctcctcctctcccaccgcatggccttccacaaccacctctcccaccaggacctctcctccctccaccacttcgccgccgaccagcagccgccgccgccgcagcaccagcagcagcagcagcacctgccggactcctcctcctccgtccaccaccagctccaccacgccgccggccccaactggctcaacaccgccctcctccgctccgacgccgcggcggcggcggcggcggcggcgggcggcaacagcttcctcaacctgcacacctcgtccgactccgccgcgtcgccgcaggcgcagcagcagccgccggcgacgtccgcgtcggccgcggcggggcaccaccagtggctgtcgcggcagcactcgtcgctgctgcagcggaaccacagcgaggtcatcgacgcggactcgatcatcgactcggcggatttgaaggagagcgtgagcaagggggacggcgggggcggcggggccgcggagagtaattgggagaatgccaagtacaaggcggagatattggcgcacccgctgtacgagcagctgctgtcggctcacgtggcttgcctgaggattgccacgccggtcgaccagttgccgaggatcgacgctcagctggctcagtcgcagcatgtggtggccaagtactcggcgatgagtcaaggattggtcgctgatgataaagagcttgatcagttcatgacacattatgtcctcttgctttgctcttttaaagaacaactgcagcaacatgtccgtgtccatgccatggaagctgtaatggcatgctgggagattgagcaatccctgcaaagcttaacaggtgtttctcctggtgaaggtactggggcaacaatgtctgatgacgaagatgatcaagttgatagtgacgccaacttgtttgatggaagtttag

SEQ ID NO: 46 - DNA, 391 bp, Eucalyptus grandis
ccaacaagtcatatatcctcgacttgctcccagtggaacgccttccattacttaatcgctgctagcgctaaacccccctcactcttcaccagcaaaaacgccttttctcgcacacaaatgggtcgtcgtaaaattgaaatacagccaataacgcacgagcgaaaccgatctgtcacattcctcaagcgcaagaacgggctgttcaagaaagcgtatgagctcggtgtgctctgctctgtcgacgtcgctgttatcatctttgaggatcgcccagggcacagccccaagctctaccagtactcgtctcgcggtatccaggatattgtgcagaggcatcttcatcacgatggcgagactgataaccgtggccctggggacttttcgggcgctg

SEQ ID NO: 47 - DNA, 821 bp, Eucalyptus grandis
ctaccgtaccgcctcacttaaatatcatcgccgtttgtcttcttgctcaactgttccaaatcccaggatcacagcaaagattcccttcaccatagcacgagcctccggctcctgccgagccgtccaagccgaaatagccacgctagggaaccaggtccatgtaacgcttcgtaatcaattgaatgaaggaagcacagagggcgagccagcgagcgagtgaaggaatagcgcctcccgacacccgtatataacagcaattcaagaactgcgcttccccacaatcttcccagtacaagctctagacggtctcgactcaaaggcatggataaagtaagtgcttcgtgtaattagactcaaccaccttctctgattccccatatatacccaccagaacgtcaatcaagcagagcagcagcaccgttggcttttaagatgtttagtacgggagaatattctgctgctgccttcgaaggcatggactcgctcccgagcccaaggaagaagaagaaccagctggtgaacagaagaaggttcagtgatgaacagatcaggtcactggagtctatctttgaatccgagtcgaggctagagcctcggaagaagctgcagctcgctagggaattggggctgcagccccgccaggtggccatttggttccagaacaagagagcccgatggaagtccaagcagctggagcgtgacttcgccattcttcgcgccaactacaacgccctctattcccggttcgagtctctcaagaaagagaagcaatccttggtcactcagattgagaaactaaaccaactcgtcgagaagccgca

SEQ ID NO: 48 - DNA, 648 bp, Eucalyptus grandis
cagaagcatctcgtttcaggcaaagcatgaaggttcatcagttcgcacgtggattctttgagctcgaacccaccaccctcacgctcgggtgcaaacgcctccgccccctcgttccaaagctcccccaccagaccgacgtggtctcgactgccgcatttgtcgacatcaagagcttcatccgcccggagagcggcccgcggaggctcggctcctcctctgacgacaagagagaccctcctcaggtggaaacacatccaggagggacacgttggaacccgacacaagagcaaatcggaatactcgagatgctgtacagagggggaatgagaactcccaacgcgcagcagatcgagcagatcacggcacagctcagcaagtacgggaagattgaaggcaagaacgtgttctattggttccagaaccacaaagcccgcgagaggcagaagcagaagcgcaacagcctcggcctctctcactgctcgagaacccccaccacagccgccaccatcgccactgtaactttgaacactactaaggtacacagaaccatactaccatatttttttcctcattccggcattggtgtcagagcgctgcatgatgcatgctgacctcgacagttggttcgtcggactcatgcttcatgtg

SEQ ID NO: 49 - DNA, 559 bp, Eucalyptus grandis
tattccctctcaattttagcttctagcgttctttttcccccattttatcaaatataatcatcatcacgatcgccctcccttttcctctctctatttctctctctctctctctctctctttctctctctctctctcggagcttcagcaagactgtcaggctaaactgtggagtctcaaagattccaacaggaggagtgcgtgcataaggctcaggacatgacttgcaactagcgagggattggactgatggccttcttttcaccaaatttcatgcttcaaagcccgcacgatcaagatcatgaacaccctcatcaccagcatcagaccagatcctctcctcttgcacgcctcaggacttccatggtgttgcctccctattgggcaagagatccatgtccttcacgggcattgacgtgggcgacgaccccaacatcaacaacggcaacgttaatggggaggaagatctgtccgaagatgatgggtcgcagccagggggagagaagaagaggaggctcaacatggaacaggtgaagacattggagaagaactttgagcttgg

SEQ ID NO: 50 - DNA, 486 bp, Eucalyptus grandis
gggaaggcgaccgcttccggcggcggtggcgggtacatgagcagcccggtccctctcgggcctttcacgggctacgcgtcgatcctcaaggggtcgaggttcttgaggcccgcgcagcagctgctggaggagctttgcgaagctggccgcgcaatttgtaccgagaaaatgacggatgattcgtgcgcgatgacggagcctgccatggacagcttgagtggtggttgtgggattggtatggacgatggttgtggtggagacggcggcgagttccgccggaagaagtcgaggttaatctcgatgcttgacgaggtctgcaggaggtacaagcaatactgtcagcaaatgcaagctgttgtagcatcattcgaatgtgtggcggggcttagtaatgcagctccttacgcaaacttggctttaaaagctatgtccaaacattttaagtgcctgaaaaatgcaattgctgaccaacttcagttcaccaac

SEQ ID NO: 51 - DNA, 726 bp, Eucalyptus grandis
tttctctctctatctccatctctctctctctctctctcttggatcaagccgaaatctctctgctcaatccctctccgatccgatctccgccgccgccgccgccgccgtcgctggacctcgatctcctctcctctcctctcctctcctccgccgcggagctctccggcgatcccgcctcgcttcggctttagggttttcccctttcccccggggtggtcgcgatttcggcgaggcattgtttcggatttcgcggggggatccatgggtcaacagtcgctgatctacagcttcgtggcgcgggggacggtgatcctcgccgagtacacggagttcaccggcaatttcacctccatcgcctcccagtgcctccagaagctccccgccaccaacaacaagttcacctacaactgcgacggccacaccttcaactacctcgtcgagaacggattcacctattgcgtagttgcagctgaatctgctggcagacagattcccattgctttcttggaaagaatcaaggatgacttcaacaaaagatatggtggaggaaaagctacaacagctgctgccaacagcctgaacagagaatttggtcccaagttgaaggaacacatgcaatactgcgttgaccatcccgaagaaatcagcaagcttgcgaaagtgaaagctcaagtatctgaagttaaaggtgttatgatggaaaatattgaaaaggttcttgaccgg

SEQ ID NO: 52 - DNA, 395 bp, Eucalyptus grandis
tgagtggtggagtgtccacaataagtggccttacccaacggaagccgacaagattgcgctggccaaatccactggcctcgaccagaagcaaataaataattggttcatcaatcagaggaagcgtcattggaaaccctcagagatcacacattataaagtcatttagacattttgttaaccattcttgcatgagttcaattacagagcatgtagaatcacaatgccttcccccttttttgggggaattaaagagtcaccaaggatgcgatgtacacaaagaaacaacatgagcgcagcaggaagcgatcacctaatgtcgcagcaagcacgacatccagttcacctcaatcagccactaatattgcccggggatactgtccatgagagcgaattgc

SEQ ID NO: 53 - DNA, 1700 bp, Eucalyptus grandis
cgaaaagggcagaggttaatgctctgcaccaaccgccttactctttcttaaacctctcaagcctctcactcttctgagctcattacttcacttacaacacactctctctccctgtattagaaggaaaggatgagtaaacaagatgtcatgaagatgcagacgtgtgttctcagagtgaacatacactgtgaaggatgcaagcagaaggtcagaaaactgctgaagaagaccgagggagtgtactctgctaatatagatgcggagcaaggcaaggtaacagtgctcggtcccgtagatccgtacacgctcatcacgaagcttgagaaatcagggaaacatgcggagctctgggggggatcaggaggacacaagaacggcacccaaaaccctcctccttcgctcccacaacaaccaccgcagtcggtttcgctccgtcgacgaatctgcacggaggaggagacggcccatggcgatgcaaactgggatagggctttccaagatcctggtcctcgccggagctggatacactggcacgatactgtttcagaacgggaagttgtccgacttgttgggcgagctccagggtttggtgaagggattagaaaaatctggtagccaatcagatggagataaagactattctgatgctgttgccgcacaggtgcgtcgattggcaatggaggtccgacagctagcctctgcacgtcaaataactgtcctgaatggaaattctagccaaatgggcaacttaactaatatggttgttccagcagctacactgggggcactgggatatggctacatgtggtggaagggtctttcattctcagatctcatgtatgtaaccaagcgcggtatggccaattgtgtggcaaacttgacccaacatctagagcatgtctccgaggctctcaactcagtaaagaaacatctaactcagcgaattgagaacttggatggcaaaatggatgaccagagggagctatcgaaagaaataaagaatgaggtttcttctgtaaaagccaatcttgatggtctgggtgatgacctggattttttgcagagaatggtttccggtttggatgtacgaatgggatcactggagtacaagcaggattgggcgaatgagggtgtgaggtatctctgtggtgtggctagcgggcagaaggtggaaatgccaaaaatgctgcaggagcaaattaagatttcaggcacctctcgaggattactctcatatcaggatactccaagtcttaagggtctgaaggaaatcgctgatgcattgaccttgagtattgatagatcagcttcagatgctgttgtgcaagatggagttgaaagattaaatggaaaaccaaagccattgccaagggctagttcaaccacatgttgatcgtagagtaatgtgaagttcccctcgcactgtggtactaaaccatggatgtacatgtgcttgttacaccacctttcgattcctcaaggttggactttggtagcatcagtcctcattgcagatgtaacggtagatttggtatgtaaatggaattcacttccaaagtatgagagattgagagttattatggcgatgcagattggtgctgtcaaagtaataatccggtgaatctcatcccgaatatttgctgctcttttgtattatttttcaagttatggtgtgaaaacctctgaagcggtttgtttcc

SEQ ID NO: 54 - DNA, 944 bp, Eucalyptus grandis
ctcttcctccctcctctgcaatttgcacggagccctcccgctctcgcttctttaacatgcccaccacctcctggtgcaacttcacctcgaggcctccgtgagctactgtgtgggcgtgcttctcttctcgtaataattctaatcctaacatggtgtggtatgcgagacaaaaccagaccagaccctccatggctcgtctagtccctttcctatccgtttcgtgacccacctgggcatctccaattactctctctctctttctctctctctctagggttttcgaagacagctcctccccctcgaagctcgctagggttttggatcgtcgtctcatctcgggtcgtgtttggaatggaggaatatggccagatgaacgagaacagtagcactgggtccagagggaacaacagcttcttgtacgcatcgccggttcttgggccgagctcctccggcaatagcaattacgggaggggaaatagcagcggtggccacttctattcccagtccggcgatcactgcttccaatccgaagcgccgccgcacccggtggtgaagactgaagcaaccacctctcaccacggccatgctcagaagtttcatcactattctctggtgagagaccatcatgacccatcagcttctcaccaccaccaccaccaacaccaccagcatcagcagctacaaacagcgagcgagagctcgcgcgaggtcgatgccatgaaggccaagatcatcgctcaccctcagtattccaacctcttggaagcttacatggactgccaaaaggtcggagcgccgcctgaagtggtggcgaagctgtcggtggcgcgacaggagttcgagtcgcggcagcggtcgtcggtggcttcggcggacgggtcgaaggacccggagctggatcaattcatggaagcgtattacgacatgctggtgaagtaccgggg

SEQ ID NO: 55 - DNA, 915 bp, Eucalyptus grandis
gtgaagaaggtgaagatgaacaggtcttgcagcccaagatcaagcggaagcgtagtctcagggtgcgccctcgtcacactatggaaaggccagaggaaaagtctagcaatggggcactacctgtacaatgtggagattctgctttcttgccactccaaatggaccacaagtatcaaccccagtcaaggactgcgtctgagaccaatccctttggagaacctactgcttccaagcatggtcatggtggtccctccatgaaaagcaagcgacaaacatctctaaggagaataaatgatccatcaaagctacatcccttgccaaaatctagcagatcaaatcacatttcgtcatcagatgctgctgcggaacgctcgagagaaaactggaatggtagagttgcaaatccttcaggaaattcaagtgttggtgccggtttatctgaaatcattcagagaaagtgcaagaatgtagtgagcaagctccagaggaggatagataaggaagggcatcacattgttccgctgctaactgacctttggaagaggatgggaagtcctggtcatatgggtggtgttggaagtaaccttttggatttgcggaaaattgatcagcgcattgagaaattggagtacggcgatgtgatggatcttgtgcttgacgtgcaactgatgttaaaaggtgccatgcagttctatgggttttctcatgaggttagatctgaagcgagaaaagttcatgatctcttctttgacatattgaagattgcatttccggacacagattttgaagaagtgaggaatgctctctctttctcgggccctggtgctgcatcccaatctgctccatcaccaaaacaggcatccgctggccaaagcaagagacacagggcattaaatgaggtcgatgctgacaaag

SEQ ID NO: 56 - DNA, 498 bp, Eucalyptus grandis
gtggtggggaaggctctgcagaaatgcgccaaaatttctacggatttgaagaaggcgctctatggctcttccgtcgcttcatgcgagcactactccgaagtggaagcttcctctaatcggattgtcactcaggatgatgttgatgcagcatgtggtgctgatgatacagattttcagcctgttctgaagccttatcagcttgttggtgtcaactttcttcttttgttgcatcggaagggcgtaggaggagaggggcagggggtgctaaaatatgatacatctctagctaatggtgcatctttgtactccatgcaagccatcctagcggatgagatgggtcttgggaagaccattcaggccataacatacttaacattgctgaaacacttgaataatgatccgggtccgcacttggttgtatgcccggcttctctcttggagaattgggaaagggaactcaaaaggtggtgtccttcattttcagtactccaatatcat

SEQ ID NO: 57 - DNA, 474 bp, Eucalyptus grandis
ccaaaggtaagttcgatcaactgtagatcataggagtaatttaaaccatgttcatggttgacgaccacgctttatgtttgagttgcaattgtacattcaacattctggcgtgttgcaattgcagctatcccaaagattcggacaaacacatgctcgcaaaacaagcgggactaaccaggagccaggtgtctaactggttcatcaacgctcgggttcgcctctggaagcccatggtcgaagaaatgtacttggaagagaccaagagccgagagcaagctgggtctgagaacggcacgactcgcagggccgccaccaaatccaacaaggacgctgctggtttgaagtccgcatctcaagaagacaatgcctttggaatgaacagctccatcaaatccttccaatcaagccccaacaaggccctcaatcaagccgccatttcaccctccgagaactccaactcgacttcctcaactt

SEQ ID NO: 58 - DNA, 489 bp, Eucalyptus grandis
ggagcaccagcctcgggtcaaagttcccatgcacttcaagtggaggaaacccgagattcacccctcgggtttgtggtgaaggtggaggaccgcctgagttccgggagcggtgggagcgccgtggtggatgaggacgggccgcagctcgtggacagcggccattcatattttcattgcaatgactacccgggaagcttggtggccgtcaatgggttgcagtcagaggacgatggaagcgatgatagccgaggttactgctcagagattttcgccgctgctgaagagccgcatcaggagggaggcgtgcctaatggggtggtgggcgtggccctagttttaggttttcgccttttggtatgttctcgtaaatggttcaagtcaaatatgtgctcatgagactatgcaatgtttcacgaaggggaagaatctgtaaacgtttactggaactttggacatgaataaaactgacgtgtttggtcaaaaaaaaaa

SEQ ID NO: 59 - DNA, 456 bp, Eucalyptus grandis
tctcgccttcaggcagtgaataggaagctgactgcaatgaacaaacttttaatggaggagaacgataggctgcaaaagcaagtgtcacagctggtgtatgagaacagttatttccgccagcagacacaaaacgcaaccctcgccaccactgacacgagttgtgaatcggtggtgaccagtggtcagcaccatttgactcctcagcatccaccaagggatgccagccctgcaggacttttgtccattgcagaggaaactttaacagagtttctttcgaaggccactggaactgctgtggagtgggtccaattgcctgggatgaagcctggtccggattccattggaatcattgctatttctcacggatgcactggtgtggcagcacgtgcatgcggccttgtgggtctagaaccttcaagagttgctgaaatcctcaaagatcggccgtcgtggtat

SEQ ID NO: 60 - DNA, 455 bp, Eucalyptus grandis
tgacgatgtttgtggaggaggaaagagaccggaaaggcctttcttttgcacatatgacggggaggaaaatggagacgatgattatgatgagtatttacaccaacctgagaagaaaaggcgattgtctatcgagcaagttctgtacttggagaagagctttgagactgataacaagcttgaaccagataaaaaagttcagcttgccaaagaactcgggttgcaacctcgtcaagttgctatttggttccaaaatcgaagggcaagatggaaaactaagcaaatggagaaggatttcgataaattgcaagctagttttaactgtttgaagtctgattatgaaagtcttctcaatgagaaggagaagctcaaagctgaggttattcatttgacacaccagctagagcaaaggagcaacggaattctgaaccattcgacatatctgaacaattgcacac

SEQ ID NO: 61 - DNA, 406 bp, Eucalyptus grandis
cccaaatcaaatgatatcgggtgaaagattttgagttttttttttttttcatttgaattgtcaccgtactttttccgaaaccgggcacaatggagaataaattcaggggtacaatcatttgagttcatacgacatgcctaattacatgaactgcgaaactcaaaagttcaatctttctccttcccctgcatcagcgcctaattctgaaaaaaattgagcgtcagcaagtgtttagggatggatttcttgttttgctagaggggggattggctatgggaattgaggaggccacgaagaggcaatcgattttcagctatcctgaggatctttacaacgaggaatattatgatgaccaggcgccggaaaagaagcgccgcctcactcctgagcaggtgcatctgttgga

SEQ ID NO: 62 - DNA, 530 bp, Eucalyptus grandis
ctctctactttttatcttcttcttcttctccgtcttcttcttcactgatcactgcaaaaaaaaagaaaaagaaaaaaaaaaagtactcctccgcctccgcctcctcctcctcctgctccgcagccgtacgcaggcgcgcacgctcgacagcgcattcctcctcccctcgttcgcggcggcaggcaggcaggcaggcaggcagacactgcgcgtgccatgagaagaaggccgtgatggaatgggagaagcaggaacagcaccacccccaccaccaccaccacccccaccatcacccgcagcagcagcagcagcaccaccagcagcagcagcagccgcagcagcagcagcaagcgaaggaggctcagcagcagcagcagcagcaggggggagagggcatgggtaacgggacggcggccgggaacgggggcggagtgctgtacgtgaaggtgatgacggacgagcagctggagaccctccggaagcagatcgccgtctacgcctccatctgcgagcagctcgtcgagatgcac

SEQ ID NO: 63 - DNA, 452 bp, Eucalyptus grandis
gcccggggccccgtcctgctggccgagtacaccgagttcagcggcaacttcaccagcgtcgcctcccagtgcctccagaagctccctgccaccagcaacaagttcacctacaactgcgacggccacaccttcaactacctcgtcgacgatggcctcacttactgtgtggttgcagttgagtctgttgggcgccagattccaatggctttccttgagcggatcaaggaggactttactcacagatacgacgcaggaaaagctgcaacagcatctgctaatagcttgaacagggagtttgggcctaaactcaaggagcacatgcaatattgtgttgatcatccggaagagatcagcaaacttgctaaggtgaaagctcaggtatcagaagtgaagggagtaatgatggaaaatattgagaaggttcttgatcgtggtgaaaaaatcgaacttct

SEQ ID NO: 64 - DNA, 354 bp, Eucalyptus grandis
gccaagtagcaccccgtttgccccacattatctgtgatatgtaaacgtggtgggcctctgttagctacaatatgattggcatcatttaagcttttgcgtaatcatcagtgttctcaatttgcaaaataccattaacggatcttgcagcatggaaagcattttagagaggtacgagagatacacttatgcggagcgacagcaagtggccactgattcccctcaagtgcagggaagttggtcgcttgaatatcccaagctcgtggctaggatcgaagtcttgcagaggaacataagaaacttgagcggagaagagcttgatcccttgagtctgagagagctgcagtatttggagca

SEQ ID NO: 65 - DNA, 1239 bp, Eucalyptus grandis
ctctctctctccttccccttctgactttgctcaagcttctttcctttctttaggataagtgctacatgagcttgtcgctttgtgtttgatctcaatttcgcacatgaaggtgatgaagctcactaatagcccatcttcttttctctctctctctctctctgcgcgatttgttttgttcagcgaaagaagaagagataaatattgaagtgaagtgaacagctgcgatggcgacttactaccaccagagctcatctgacccagatggagccctacaaaccctcgtcctcatgaaccccgccagctacgtccactactccgatgccccgcctccgcaccagcaaccctcggcgatcttcctcaactcctccaccgccgggccgcccgcatcccagacccagcaatttgtaggcatccccctacccggcagcgccgccgactcgcagccctcgtccatgcacgtcaaccacgatctctcctccatgcatggcttcatgcctcgcgtccagtataacctctggagctccctcgacccgtccacggcggcgcgtgaggcctcccgcacccaccagcagcaggggctctcccttagcctctccccgcagcagcccccaccgaccccagctgggtaccgttcctttgtccgggccgagcgcagtggcgatggagcagcgggttctcagcaccctccagcaatttcaggcggtgaggacgtgcggatctcgggcgggtccccatcgtcggcctcaggcgtaaccaatggggcggcagttgggtcgggcatgcagggggtgttgctgagctccaagtacttgaaggccgcacaggagcttctcgaagaggttgttaatgttgggaacaccggaatcaaagctgagatgctgaagaaggccagcggccaaagtaagccgggtggagaatcagcggcactgaaggaggaaggaggtggcgacggcagtggtaagcgcggcgcagaactgtctatggctgagaggcaggaaattcagatgaagaaggctaagctcataaacatgcttgatgaggttgaacagagatacagacagtaccacaaccagatgcagatcgtgatatcctcgtttgagcaagctgcggggattggctctgcaaggacgtacacggccctcgcgctgcagaccatctcaaagcagttccggtgcctcaaggacgcgatagcaggccagattcgggccgctaataagagcttgggcgaggaggatggcc

SEQ ID NO: 66 - DNA, 371 bp, Eucalyptus grandis
gttgagcaggtacagtttcttgaaaagagttttgaagtagagaacaagctcgagccagatcgcaaaatccagttggcaaaagacctcggattgcagccacgacaggtagcgatatggtttcagaatcgtcgtgcacggtggaagacgaagcagctagagaaggattatgaaactttgcaagcttcttttaacaccctgaagtcagactacgacactctcatcaaggagcggaatgatctgaaagccgaggttcttaacctcacggacaagctgcttcacaagggaaatgagaaggagagttccgagtcgtccagcaaatcatctcaagggctattccagaaccccattgctgattctgtttctgaggacga

SEQ ID NO: 67 - DNA, 387 bp, Eucalyptus grandis
ggccatcattagttccgatcaaatggagcgaaggatgttagaagcagctcggaagggcaatgtccatgagctggaagacttgatcagcagcaatgagctcatcctcgaggagatggatcttgaaggagccggtcacacgccgctgcatgtcgcctgtgtggctggccatttggatttcgttcgagagctcctgaagcgtacgccaaagcttgcggaaaaggtgaacacggatggtttcagcccgctgcacatcgcggctgctcgaggtgatgtcgagatcgcgagggagctcttgacaatgggtccacacctgtgctccgtgaagggacgggagagaagaatccctttgcattatgccgctatgaacgggaaggtcgatgtcatgaa

SEQ ID NO: 68 - DNA, 479 bp, Eucalyptus grandis
tccggctgtcgaaggaccagtccgccgtcctcgaggagagcttcaaagagcacaacaccctcaatcctaagcaaaagctggcactggcgaagcagctggggctgcggcccagacaagtggaggtctggttccagaacaggcgagccaggacgaagctgaagcagacggaggtggattgcgagtacctgaagcggtgctgcgagagcctgacggaggagaaccggcggctgcagaaggaggtgcaggagctgcgggcgctcaagctctccccgcagttctacatgcacctctcccctcccaccaccctcaccatgtgcccctcctgcgagcgggtcgccgccccgtctcccccctccgccgtcggccgccccctcgccgccgtcccggcccacccccgccccgtgcccctcatcaacccatgggcccctgcggccgctttagaaatagtggatccccccgggctgcaggaattcgatatc

SEQ ID NO: 69 - DNA, 684 bp, Eucalyptus grandis
cagaaagtgactcgccctagtgtaggagtagggagaggcttggatgcacattccatttcgcctccttgaagccctccaacggcgcagatatttccttgcttttttaggcaaaatgttgaaaaactggtgataataaaaagaagccctgtttagctataaagggaagccccatcctttctcctccctttctctttcttacctgtccccccctcccctctcctggctctcgctctctctctctctctcagttctttctcggacgggtgtctgtgcgtggcttttgatcggtcatcacctgaggccgcgtctgcaagcaagtgaagaaggaggacaaggaatatggcgagagagaagatcaagatcaagaagatagacaatgtgacggcgaggcaggtgacgttttctaagaggagacgagggcttttcaagaaagccggagagctgtcggtcctgtgcgatgccgaggtcgctgtcgtcattttctcggctaccggcaagctctttgagtactccagctccagcatgaaggacactcttgagaggtacaccctccaccacaataatcttgagaatatggaccaaccttctctcgagctgcagctggagcatagcaataacatgaggttaagcaaggaagtggcagaaaagagccatcgactcaggcagttgaggggtgaggatctt

SEQ ID NO: 70 - DNA, 356 bp, Eucalyptus grandis
gcaggttgctgtgtggttccagaatcgccgggctcggtggaagacaaagcaactggaaagggattatgattacctcaaatcttcgtacgattcccttctttcggactatgattccatcttgaaggaaaacgagaagctcaaactggaggtctattccttgacagaaaaacttcagggcaaggaagtcgatggagcaccaatgacaggcccctcggagccagctccgctggaggaggctgatgtccaggccgtccaattcagtgcgaaggtggaggataggctgagcacaaggagcgggggaagcgcagtgatcgacgaggaaggtccacagcttgtggacagtggcaactcgtacc

SEQ ID NO: 71 - DNA, 725 bp, Eucalyptus grandis
cccaacgcctccccaaacgcaacgcaaagattccatttttccctctcgccgtcgcgtgaaactccggccgccggcggcctcagatcaccccgcttcagcagcagcagcagcaagcgctgagcaaagaggagaaggtggctgctttcatggaggcccactgagtcttcagtccggagcttccgacccaagaaagggagagcagacgaagcagagggggagaggcaaagagagagatttgaggagctgggaagtgttttgggaaggagtggcatgatggggttttgcatatgtccgctggagacgccggcgaggctgctgtggacgaccagcttcttccgtcacaagctcatgctcttctaactcgcggcctccctgtgtagacatagtgtaaactcgtttgtacgtatatctacgtgttaagtgctttttttccagtgcctcgccggagtttcggtcaggctgggatacaggttgccggagatccacctcgggctgagaagggtatggaggcagggcgttttctgtttgatccccccgcgcttcaggggaacatcctcttccttgataaaggatcaagatccatgatgggcatggaggaatccccgaagaggcgccggtttttctgctcgccggacgaacttttcgatgaggaatattacgatgagcagatgccagaaaagaaacgtcgcctcactcctgagcaggtgcttctgctggagaagagc

SEQ ID NO: 72 - DNA, 523 bp, Eucalyptus grandis
ctgaagacccaaatcctccctcacttctaggtgcatagtttgatccctctcattctcatggatgaaatgtacgggctctgcggcggcggcggcggaggaggaggaggaggaggagaggagtactccgagagggcgctgatgtcgccggaaaacctggtgctgccgtcagagtaccaggcctggctgtgctcggccgggtttagggataatcgaatccccatgtacgggttcgggtcggaggagttcgtgtcgtcggcgtcgggcatgtccgagaccgcctcggtcacacccgaccaagaggatgcggcggagacagcgatcaagtccaagattaagtcccacccttcgtaccctcgtttgctccacgcctacatcgattgccagaaggtgggagcaccaccggaagtggtggggctgttggacgaaatccggccagagaacggcgtgtgcaagcgagacgccgccgtttctacatgccttggtgccgatcctgagctcgacgagtttatggagacgtacacag

SEQ ID NO: 73 - DNA, 646 bp, Eucalyptus grandis
ctaacctggccgtctctttcttcctgccattggctcttccttttgtattttcctctgctccctgctccctctctctctctaaaagcctgtgggcttatagggtccgttgaatggtctctctctctctctctctatcaatcgctctctacagagagcagagggaaattctcgagattggcgtctggggataaaagaccagcacagggaccatcttcttcattccctctctctcttcctcgactggaacaagaaaagctctgtgtgtagcggaggaagtgcgtccagagagagctctcttgctgcgggacattattctcatgaaggagataggaggctctcttcggcagagagagcccgcctccggagagagcctgcccgactgacccccgcgcagacattggcattcctccttcttcttccttccccctctcgagaacgttcggagaaaaaagcgacagagcggaacccgggactgcggatggcgctggcgatgcacagggagtgctcgagcaagcagatggacgcgagcaagtacgtgcggtacacccccgagcaggtggaggcgctggagcgggtctacaacgagtgccccaagcccagctcgctgaggcggcagcagctgatccgagagtgccccatcctctgc

SEQ ID NO: 74 - DNA, 471 bp, Eucalyptus grandis
ctcctctctcataagtcataattcacaggcgcggcacaaggcacgaaaagataaaaaaaaaaacgatggccggtgaggagccctattctgccgacacgaactcggacactttcgctgatgaagaaacgctgattccgagttcttccgaggctcttgagtccgcctgggttcctacttcctcgaccgctcatcatggttcaaaatcagtggtcaattttgaggacgtttgtggaggaggagacaccaatactgcgccgaggccatacctccgacagattgatctgaaggaagaagccgtcgaagaggactacggcgacgggaactttcagcctcctggtaagaagcggcggctatcggccgaccaagtccatttcctcgagaggcactttgaggtcgagaacaagctcgagcccgagaggaagatccagctcgccaaggacctcggcctgcagccgaggcaggtcgcgatct

SEQ ID NO: 75 - DNA, 766 bp, Eucalyptus grandis; identical to SEQ ID NO: 21

SEQ ID NO: 76 - DNA, 443 bp, Eucalyptus grandis
gttcttctccgattcttgacgaccgcaacaacaatatgcaacaacaacgcgggtggttcaggttcaggctcaggctcaggttgtttcttcatggacaacgatgtcaaggccaagatcatggctcatcctcactaccaccgccttctctcagcttatgtcaattgtcagaaggtgggagctccgcctggcgtggtggcaaagctagaggaagcgtgtgcatcggctgcgataatggccgggaacagcggcatgagcaacacaggttgcattggtgaagacccagctcttgaccagttcatggaggcctactgtgagatgctgactaagtacgagcaagaactctccaaacccttcaaagaggccatgctcttcctccagaggatcgagtgccaattcaaagcccttactcttggtgttccttctgattctgtggctttgagtga

SEQ ID NO: 77 - DNA, 529 bp, Eucalyptus grandis
tggaagcagtaaaggagtgggaataccccggcttcgttttttggaccagcagctcaggcagcaacgagccctacagcagcttgggatgatgcaacagcatgcatggaggccgcaaagaggacttcctgagagttctgtttctattcttcgggcctggctatttgagcattttcttcatccttacccaaaggattctgacaaaatcctgcttgcaaggcagacaggcttgacaagaagtcaggtctcgaattggttcatcaatgcaagagtgcgtctctggaaacctatggtcgaagaaatgtacaaagaagagattggggatgcggaaatggactccaactcatcctccgacacagccaagccaaaaacaggagatatcaagtcctccatggaggaccgggtggaagaagtgcaacagagttcaacagctacacagagatgcagctcaggccagctcatggactcatcattcgaccggactccagatgtcgaaatggcaggccactctgtgggattcaactacctgaac

SEQ ID NO: 78 - DNA, 941 bp, Eucalyptus grandis
acttaatgcaatctgcaaggttaagggttatgctgacccattacaatatcagagttgatgtctgaggtgcaagtcactcagatgaaatctgatggtacgctagaggagagtggtgaggcacggcgacttagaaattctttggaggaaatggcaaacgaaggcaagagccctagcatattgaaagaatgtggtcttccagaaaattctttcgtctcaattccacaaaaaatgacagaaaatcggtggtcctggtcggaggtcaaatatctctctaattgccttcttttggcactagatgcaagccttgagcattctcttttgggatctctgatgaatatggatagatatgctgctgcagagagttatcacaaacttgctatggcttttgcccctgtcccggatcttcacattatgtggttgttgcacttgtgtgatgcacaccaggagatgcagtcttgggctgaagctgcacaatgtgctgtggctgttgctggtgttgtaatgcaggccctagtagctagaaatgatggtgtctggagtaaagaccatgtgacggcactacgtaaaatttgcccaatggtcagcagtgagatcagctgtgaggcatctgctgcagaggttgaggggtatggtgcttcaaaactcacagtagactctgctgtgaaatatctgcagcttgcaaacaagcttttttctcaagctgagctttatcatttctgcgcaagcattctggaactcgtgattccagtttacaaaagcaggagagcatatggacagctggcaaaatgtcacaccttgctcaccaatatctatgagtcaatccttgagcaggaatccagcccaattccttttacagatgctacatattacagggtgggattctacggtgaaaaatttgggaagctggataggaaggaatacgtttatcgggagccccgtga

SEQ ID NO: 79 - DNA, 436 bp, Eucalyptus grandis
cccacaccaagactcaccaccatcactcaatcgcaatctccaaccccaccaagtctatgtcccaagactatcaccaccccagcatcttcgccttctcaaataacggcttcgagcgacccgacgttgccgcggcctccgctgcctcagaccaagaacagcagcaccatgtagcccagcagatctgccgtgacaagcttcgagtgcaaggctttgaccaacctccaccgccacaactggttggcatggaggaggaaccaggcgggctgcccgcgtacgagaccgctgggatgctatctgagatgttcaatttccctcccggcggtgcagccgctgccgaattgctggagcagccgatggcgtcgggttatcgggctgcccggccatcactgccaaccgtgagtggtacggctcaaaaaacccaggtgtgtataggcga

SEQ ID NO: 80 - DNA, 377 bp, Eucalyptus grandis
atcgttgatcacatggatttagagccatggagcgtgcctgaagtattgcgcccactttacgagtcgtcaactttgctcgcacaaaggacaacgatggcggctttacgcaatctgaggcagatctctcaagaagtttcccagccaaatgtcactggttggggaagaagacctgcggcactgcgtgctttaggtcagagattgagcaagggttttaacgaagctgtcaatggatttatggacgatggttggtctatgttggaaagtgatggcgtcgatgatgttactcttctcattaactcatcgccagccaagatggcaggcgtgaacatttcttacgcaagtggttttccttcaatgactagtgcggtcttgtgtgc

SEQ ID NO: 81 - DNA, 478 bp, Eucalyptus grandis
aggtttgtcgatgccactggtgttcttctgagtctagattgatagagaaggaccggaagtcaccaagaaaagggtcttatctggtttcttgatagccttttttggttttgtattgagaattcacttcgttcagagaggagagagcctgtgagagtagtgatcggagatggcgacggcctttgcagggacgcagcagaagtgcaaggcctgtgacaagaccgtgtatctagtagatcagctcactgctgacaacaaggtcttccacaaggcctgcttcagatgccaccattgcaagggcactctgaagttgagtaactattgctcctttgagggtgttctatattgcaagccacatttcaatcagctctttaagatgactgggagcttggataaaagttttgaaggcactccaaaaactgtcaatagatcttctgagcagggccaaagtaatgccaaagtctcgagtatgtttgccgga

SEQ ID NO: 82 - DNA, 493 bp, Eucalyptus grandis
cagatgatgatgaggatgacgatttgtttcaagatcgttttagcattgcatacaaccttgaccgagagtttgggccaagacttaaggagcatatgcagtactgcatgagccatccagaggagatgagtaagctatccaaattgaaggctcagatatcagaggtcaaagggattatggttgataatattgaaaaggtgttggaccgtggggagagaattgaacttctggttgacaaaacagagaacctacaattccaggccgacattttccaaaggcaaggaaggcaactgcgtaggaagatgtggtttcagaatctccaaatgaaggttgtggtggctggagcagttgtcatagtaatattcttgctgtggcttatagcaaagtggggaagtaaataaaacttgttctcaggatgtaaaaagaaaaggtacaatatgattttgtatctggatatgtttgttggtatgtggagctagcctaccacttaggattt

SEQ ID NO: 83 - DNA, 764 bp, Eucalyptus grandis
atgcattctcaacaaatacagtcgattgccttatcagcaggaaacattagtgaaattatgcaatccaaacttcaatgcgctgcttccaccagtttctcttccttcttatcctttttgcccccagtgaagaatttgtaccctccatagataagcacaccccaaccagacaaagacacaattacaaaatgctcttccttccatttagatggactcaaagggtcatcccaaacattaactcttggtggtccatggtgatccgccgcgccggcgaggccgcgccgctggccgaaggcggcggcttgggccgacagccccggagaggaggcgcgcgagagagcggcggcccggcgagctgcgatcgcggctaacgcagtagccatggctggatcgagagagagaggagagagtgtgctcttgatagccttttttggttttgtattgagaattcacttcgttcagagaggagagagcctgtgagagtagtgatcggagatggcgacggcctttgcagggacgcagcagaagtgcaaggcctgtgacaagaccgtgtatctagtagatcagctcactgctgacaacaaggtcttccacaaggcctgcttcagatgccaccattgcaagggcactctgaagttgagtaactattgctccttcgagggtgttctatattgcaagccacatttcaatcagctctttaagatgactgggagcttggataaaagttttgaaggcactccaaaaactgtcaatagatcttctgagca

SEQ ID NO: 84 - DNA, 490 bp, Eucalyptus grandis
ggtttatgcccctatcgattcaacagcgatgaccatcgcgttgagcggcgaggacacttccacagtgcaaattcttccatctggcttcacgatctccagcgatggccggattggcacaagctccagcaagccagcaggtacacttctcactgtggcgttccagatattggtttccagccactcaggtccagagcagctcagcgtggaatccgtggcgaccgtgaacactctcattagtgcgaccgttcagaaaattaaggctgctctaaattggtctgccgcggaatgatttttttttttttttaatatttgactaggcggaatgatccttctatttgtgttgatggtttgtaccgaaagatgagatgatataatttcatagcgagatgatttaatttcacatcgtcaccaacacgtggtgagtacaaccagttcctgtccataatgatctaagttggtgtttatattggaatgactttttgcggaactg

SEQ ID NO: 85 - DNA, 427 bp, Eucalyptus grandis
atcaaatggagagagcagctcgaaagggcaatatccatgagctgaatgacttgatcagcagcaatgagcaaatccttgaggagatggctcttgaaggagccggccacacgccgctgcacatcgcttgtatgggcggccatttggatttcatccgagagctcctgaagcatatgccgaagcttgcggaaaaagtgaacccgtgtggtttcagcccactacacatcgcggcagctcgtggtgatgttgagatcgcgaaggagctcttgaaagtgaatacagacctgtgctccgtggagggacgggagagaagaatccctttgcatgatgctgtcatccacggggaggtcgatgttatggagatactactatctacttcacctgagtctgttgaaaagaaaaccgcccggaaggagaccgtgcttcacct

SEQ ID NO: 86 - DNA, 365 bp, Eucalyptus grandis
gccaagtgacatcttcctcttgcaactttgcaatggagtggatgaaaatgctgttggcacttgtgctgaactacttttcgctccaattgacgcatccttttctgatgatgcacccattattccttcgggattccgcatcattcctcttgatccaggatcggatgccttcagcccaaaccggacacttgatcttgcctcagctcttgatgttggtcccacaggcaacaaagcggtcggtgataattctggtcatagtggaaacaccaaatctgtgatgactatagccttccaattcgcatttgaattacatcttcaagagaatgtggcgtccatggctcgtcaatacctcagaagtattatagcat

SEQ ID NO: 87 - DNA, 180 bp, Eucalyptus grandis
tttctctcttttctctcaagctctctccttcatcttcaagaacacaagaccaaatcaatctcccccatctcctcaaatgggcatagatgatctgtgcaacacaggccttgttctgagtcttggcctcgagacgcccttcaagatcgaagcccagaggcaagccaaacagcgccttaactt

SEQ ID NO: 88 - DNA, 468 bp, Eucalyptus grandis
aaatcaatgcccccgaaagcgacccttcacttacacccgccatcaatagacaccccttctcggagacccaggccaccaccctcctccaggccaccaccgccatgatctcctccgctgtccaggtggcgggcccggcgcacatagatgacccctgccgccgcagcatcggaggcagcacgggcttaggcggcgccacggacatcgggtccgcgctgatccggtttgggacagccgcggcagcaacgggcgacgtgtccctcaccctggggctgcgccacgccgggaatgtgccagagaagagctctttctcggttaccgacttgggcggctgttaattagtaattaaatttttgcctgtcatctagctacctttgggaaaaaaaacaattttagaaaaagaaaacctttctttttcctccattatcattaatctagcttaaaaacaagatacaccaaccctcaggaaac

SEQ ID NO: 89 - DNA, 441 bp, Eucalyptus grandis
cttcaatgaaggaaatggtaccccaagcaaacagaaaatcaaagagattactaccgaactgagtcaacatggacaaatttcagaaacgaatgtctataactggttccagaaccggcgtgcacgatccaaaaggaaaatgcagaatgcaaccggcaacaatactgaatctgaagctgaagcagaagttgagtccccaaaggagatgaagacaaaaccggagatctttcaatctcagcagaatcctgtatcaaggaacgaagatttatgcttccaaagccctgagattagctcagatcttcattttgctgattcacagaccaaagtggagagcatggtttatccagatggcagtttgagatccaggaataggaacctaggccagctatctttctatgatgccatgatgtcaaattcaggcggtcttgcaggaaatgagcatct

SEQ ID NO: 90 - DNA, 744 bp, Eucalyptus grandis
ctcctattgatgaatctttcgcagatgatgctcctttgttgccatctggctttcgtgtcatacaattggatcctaaaacagatgggcctgcccctactcggacattggacctggcctctacgctggaggtgggatctggtggtgctcgtcctacttgtgaagctgatgctagcacctacaacctgcgatctgtcctcaccatcgcattccaattcgtgtttgagaaccatttacgggacactgttgccatcatggctcgtcaatatgtgcgtagtgttgtgggatctgtccagagggttgccatggcaattgcaccttccaggctaggtggccatctggggccaaaatctctctctggttctcctgaagctcttacgctggcacgatggatctgccgtagctacagaatttgtgctggagctgaactgttgagaggggactcccaagctggtgatgctgttttgaaggaattttggcaccattctgatgcaattatgtgctgctctgtgaatacaaatgtggcctctcctgtcttcaccttcgccaaccaagctggacttgacatgcttgaaactactctggtggccctccaagatattatgctggaaaaggttcttgatgaaggtggcaggaaagttctttcttcggagttcccgaagatcatgcagcagggtatcgcctatctgccagccggagtatgcatttctagcatgggaaggccagtggcttatgagcaagccgttg

SEQ ID NO: 91 - DNA, 509 bp, Eucalyptus grandis
gtccggctcactaaggaacagtctgctcttctggaagagagcttcaaacagcatagcactctcaaccctaagcaaaagcaagctctagcgaggcagttgaatctacggccccgccaagtcgaagtgtggtttcaaaacaggagagccaggacgaagctcaagcagaccgaagtggactgtgagttcctcaagaagtgctgtgagacgctgaccgacgagaaccggcgattgcagaaggagctccaggagcttaaggccctgaaactggcccaacccttttacatgcacatgcccgcggcgaccctcaccatgtgcccctcgtgcgagcggattggtgcgggcccgagcgtcgacggcgcagcgccgacgaagggccctttttcgatgacgacaaaatcacacttatacagtcatcactttaccaatccatctgctgcttgctgattagaagttattagggttttagagatattacagagagagagagagagagagagacatatatagac

SEQ ID NO: 92 - DNA, 363 bp, Eucalyptus grandis
ccattagagtttcacaatgacgtgagacttaccttcagcaatgcgatgacctataatcctcccagcaatgatgtccacttgatggctgatactctcaacaaattttttgacattaggtggaaaaccattgaaaagaaacttgttgtcggtggaccacaaccatcatcaacaaaatcagctccacctgaggaggtaaaagcagccaagtcaacagctcttcctaaaaagaggaaaatgtcgagtcaacaagaagttatgcctgcacctcttcttcaggtaatgacagatgaggagaagcataaactaggccaggaattggagtctttgctgggagagatgcccgaaaatattattgattttttg

SEQ ID NO: 93 - DNA, 110 bp, Eucalyptus grandis
acatgcagctctatgcgcctaccactctggcaccggcccgtgacttctggttgctgcgctacacatctgtaatggaggatgggagtcttgtggtatgtgaaagatcaatt

SEQ ID NO: 94 - DNA, 440 bp, Eucalyptus grandis
acagagagctcaagactcagctcttgcggaagtacagcggatatcttggtagcctcaagcaggagttcatgaaaaagaggaagaaggggaagctcccgaaagaggcccggcaacaattgcttgattggtggagtcgacactacaaatggccttacccatcagaatcacagaaactagctctagcagaatcaactggactagatcagaagcaaatcaacaactggttcatcaaccaaaggaagaggcactggaagccatcggaggacatgcaattcgtggttatggatgccactcaccctcattactacatggacaacatgctcggcaatccctttcccatggacatctctccgaccttgctttgaagtctatggttgatattgctaatattattcgaccctagtgtcattatgagctctaaatgtgctctttccgagtgc

SEQ ID NO: 95 - DNA, 413 bp, Eucalyptus grandis
cttggccattcaaggaaccagttgatgctcgtgaggtccctgattactatgacataattaaagaccctatggatttgaagacaatgaccaagagggtcgaatcagagcaatattatgttacgctcgagatgttcattgcagatgtcaagaggatgtttgctaatgcacgcacctacaattcccccgacactatatacttcaaaattgcaacaaggctggaagctcatttccagagcaaggtacaatcgaatctccagtctggtgccggaaaaattcaacagtagagcattcggtagactggaggccctgaccttacttctctctatatgaatatgtggagccttggatacttactctgatccatgattgcgctggggaattaactagcttcgattgaccatgtaactgaagac

SEQ ID NO: 96 - DNA, 706 bp, Eucalyptus grandis
ctttggctttccttctccatctctctcgctctctctttgggattcgtgtgttctttcttcttttttgcaccacccgagattttccgaaagctgaagtggccggggagtgaagtttaagagagagagagccatcaccaaaagcccgaagatcatggggagaggaaagatcgagatcaagaggatcgagaacacgacgaaccgtcaggtcaccttctgcaagagaaggaacggactgttgaagaaggcctacgagctctccgtcctctgtgatgccgaagtggccctcatcgtcttctccagcagaggacgcctctacgagtactccaacaacagcataaggtcaactatagagaggtacaaaaaggctaattcagatagttcaaacacaagcactgtcacagagatcaatgcccagtattatcagcaagaatctgcaaagttgaggcagcagatccaaatgctgcaaaactccaacaggcacttgatgggtgattccttaagttcactctctgttaaggagctgaagcagctggaaaataggcttgaacgcggcatcacaaggatcaggtcaaagaagcatgagatgttattgactgagatcgagtacctgcagaaaaaagagattgagctcgaaaatgaaagtgtgttcctccgcacaaagatagccgaggtggacaggattcagcaaggaaacatggttgctgcc

SEQ ID NO: 97 - DNA, 396 bp, Eucalyptus grandis
gaaaaatggggagagggaagattgagataaagaggattgagaatgcaaatagcaggcaagttacattctcgaaaaggcgttctgggttgctcaagaaggcgcaggagctctctatcctctgtgatgctgaggttgctgtcataatcttctcgaatactggcaagctttacgagttctccagttctggaatgaaacagatactatcaagatacaacaggtgtcaagattctccagagtccactgttgtagagtacaagccagagtctacgaaagaagatgataaggtggtagacaccctaaaagatgaaatcgcagagctgcagatgagacaactaaggctactgggcaaggacttgaatggcctgagcataaaggaattgcagcaccttgaacagc

SEQ ID NO: 98 - DNA, 379 bp, Eucalyptus grandis
ctcgatacagctcttaagcgcatcaggaccaggaagaaccaactcatgcacgagtcgatttctcagctgcaaaagaaggaaaaatctctacaggagcagaataacgtgctctctaaaaagatcaaagaaaatgagaaggtaatgagagagagtggacaatgggagcagcaaaccccagcaccgaccacatcctccttcatgctacaacccactttgcctcttccttccctcaccattggcaacacgttccagacaccgcatgtacttggaggagcagaacaagaggagagatctcaagcccgaccagccaacacgctcatgccgccttggatgatacgccgttcaaatgaatagagagatagagaccaacaacattctc

SEQ ID NO: 99 - DNA, 421 bp, Eucalyptus grandis
gtacttgtctgacttgatgagcagtgggcacaagcacaagaggaggaagcagttgcagacggtggagctgaaggtgaggatggactgtgatggctgtgagctcaaggtcaggaaggccctctcttctttagacggagtgaagacggtggagataaacaggaagcagcagaaggtgacggtgaacgggtacgtcgaccagaataaggtgctgaagagggccaagtcgacggggaagaaggcggagatatggccctacataccctacagtgtggtggctcaccagccgtacatcgcccagtcctacgacaagaaggcacctcccggccacgtgaggaaggtcgagccaaccgccaccagtgccatcgtgacccggcacgaggacccttacatgaccctcttcagcgacgacaaccccaatgct

SEQ ID NO: 100 - DNA, 460 bp, Eucalyptus grandis
aggatcgagaacaagataaaccggcaagtgacgttcgcgaagcggaagaacgggctgctcaagaaggcgtacgagctctcggtgctctgcgacgccgaggtcgcgctcatcatcttctccagccgcggcaagctccatgaattctgtagcggcccaaggtatcgcgtatttgtatgttatcacttgtttttctcgttaatgttatgatgagacatcagggggagaaacccagaactgagatcacactgtttcattaaattctctcgtccaaattctttcgggaaaccctcagatcttggtgatctggatcttggtgctgccctaaggagatggcgatttattggtttttcttcttttttgggtttcagtttcttgactctttttgcgatctttccgttcaccatgaaaaaaagctttcagccgcacagtttcttgcttcctggggtttctgatcttctct

SEQ ID NO: 101 - DNA, 423 bp, Eucalyptus grandis
gatcaatgctggtcgctttgaccagagaacaacgcacgaggagagacggttgactctggaaacattattacatgatgaggaaaggtatcaagaaactgtgcatgatgttccctctctgcaggaggtaaatcgaatgattgctaggagtgaagaagaggtcgagctatttgatcagatggatgaagaactggattggacagaggagatgaccaattatgaactagtgccaaaatggcttcgggccagtacaaaggaggtcaatgctgctattgccactctatcaaagaaaccatcgaaaaacactttgtttgctagcacaatagtggaacctaatgaaccggtatcggaatcagtgagaaagagggggcggcccaagagtaaaaagcatcctaattacaaggaactagatgatgacaatgaaga

SEQ ID NO: 102 - DNA, 381 bp, Eucalyptus grandis
ttgccgcccaactgaagcacagctgcgagctactgggtgagaaggacggcgcgggcagctccggtataaccaagggcgagacaccacggctcaagttgctcgaccagagcctgaggcagcagagggctttccaccagatgggcatgatggagcaagaggcctggaggccgcagcggggcctgccggagcggtcggtcaacatactgcgtgcatggctcttcgagcatttcttgcatccgtatccaagtgacgctgataagcatctgttggctcgacagactggtctctccagaaaccaggtctcgaattggttcataaatgccagggtccggttgtggaaacccatggtggaggagatgtaccagcaagagtccaaagaag

SEQ ID NO: 103 - DNA, 473 bp, Eucalyptus grandis
ctctattccactcctaattcatgcttttcgtgacaataattttgtagcatgctcaaaactctagagagatatcagaagtgcaactatggagccctggagccgaacgtgtccgcgagagaatccttggagttaagctgtcagcaggaatatttgagacttaaggcacgttacgaagccctacagcgaactcaaaggtattgaagtttctattgtccttttaattaaatgtcagcattcgcgggatgtagttattttcctacatgattggggtctatctgtgtcatcgtgaactaggaatcttctgggagaagaacttggccagttaagcagcaaagaactcgagtccttggaaagacagctagatgggtcattgaagcagatcagatcacgaagagtatgtaaattatattcacgaattctatctaagtcacatcctgagttattgtgaatacaagttactgtgtcaatcgctg

SEQ ID NO: 104 - DNA, 634 bp, Eucalyptus grandis
caaaaatagaggatgttagggaggagatactacggaaaaggagagccggaaaattacccggcgatactacttctgtgttgaaaaattggtggcagcaacactcaaagtggccatatccaactgaagatgacaaggcgaaacttgtggaggagacaggattgcagctgaagcaaataaataactggttcatcaaccaacggaagcgaaactggcacaacaattcccaatcggtcacctccttgaagtccaagcgcaagaggtaggcgcaacggaccatcatgcttgtctttgtgccgctaactgaaacacgaaacttatcaatcggtattgactctgatataaccttctgatcgactgggggtatactttatagctagagctgaacacttgtggtggtggatcaagcagtgatggtaagtagatgattcattatggaattagggcctgtaacaaatgatgcaaattccagtagattacatacacaaaacccagaaaattgatgtctttttgtttggttagaagtgcttctgttgcctaatctctcttgtatttaggcccaaaacaaacaacatgttgatttgttttctgtttttataaaattgttgtttttggcagtaaaaaaaaaaaaaaaaaa

SEQ ID NO: 105 - DNA, 483 bp, Eucalyptus grandis
ctccagtggatatcacaggaatgcaggcggtgatgaccggctgtgactctagcaacatagccgcactgccatccggtttctcgatcctgcccgatgggatcgagtcgaggcctctagtcatcagctcaaggcacgaggagaagagctcagaaggaggatcactgctcacaatagcttttcaaatcctaacaaatacctctcccacagccaagttaactgtggaatctgtggagtctgtcaacactctcatatcctgtacattgcggaatattagaacgagcttgcaatgtgaggatggatgacaactttaagttttatttaaagtagatagggataattaactgtacaactaatagggtggagaaaaattagcagttcaaaagcaatggctttttttcatttgttctttggttggattggaaggcttggcttggttttaagcatgtttttatgcagaaagtggtgactggcgggcaagagaga

SEQ ID NO: 106 - DNA, 404 bp, Eucalyptus grandis
tcgagaacaagatcaacaggcaagtgacgttcgcgaagaggaggaatgggctcctcaagaaagcctacgagctctccgtgctttgcgacgcggaggtcgctctaatcatcttctcccatagaggaaagctgtacgagttctgcagcagctcaagcatgctcaaaaccttggaaaggtatcaaaaatgcaactatggagcaccggagcctagcatctctacccgggaagcacaactggagctaagcagtcagcaggaatatctgaaacttaaggcacgctatgaagccctacagcgaacgcaaaggaatcttcttggggaagaattaggccctctgagcagcaaagaactggagtctctggaaaggcagctcgattcatccttaaagcagattcgatccactcga

SEQ ID NO: 107 - DNA, 527 bp, Eucalyptus grandis
gctagaaaagcgatccattggtcaggcagcagaacagctttatctattctcttgtacgacgcgcagtagacgaagtaacatagcccaccatatgcaagagccgaacttggccatgatgggcggcggtggtggcggcggcggcgggggcggggggatcgtcggtggcggcggcggggggctgggcagcgaggcgtcgttctcgggcgatcacccgcagcgccagctcaagggggagatcgccagccacccgatgtacgagcagctgctgtcggcccacgtggcgtgcctccgcgtcgcgaccccgatcgaccagctgccgctgatcgacgcgcagctggcgcagtcgcaccacctcctgcgctcctacgcctcctcggtgcagcacggccacagcagcctctctcctcacgacaggcaggagctcgaccatttcttggcacaatatctggtggtactatgcagcttcaaagagcagctgcagcagcacgttcgagtccatgccgttgaagccgtcatggcctgtcgtg

SEQ ID NO: 108 - DNA, 482 bp, Eucalyptus grandis
cccatcccgatgagaagcaaaggcagcaactgagcaaacagctgggcctcgctcctaggcaagtgaagttctggttccagaatcgcagaacgcagctcaaggcaattcaggagcgccatgagaattctctgttgaaaacagaaatggagaagctcagagatgaaaacaaagccatgagagacaccatacagaaatcttgctgccccaattgtggctcagccaccacaagcagagataccgccttgacaactcaggagcagcaactccgaattgaaaatgctcgactgaaagccgaggtcgagaagctccgaacagctctaggaaagtacactccagggacggcatcgccttcttgctcagccgggaacgaccaagagaacaggagctccttggatttctacaccggaatctttgggctcgacaagtcgaagatcatggaattggtgaaccaagcgatggaagagctcaagaagatggctact

SEQ ID NO: 109 - DNA, 343 bp, Eucalyptus grandis
ctcttcagctgaaccctccctctccccatctctcttttcttgctatgaccaacgacaagaacaccaggaacaaaaaaaaaaaaaagctccaataaaaaatctctacagggagagagagagagagcaagaactcaagaaaccctaaacttatctagccccgtgtcatcgaagagagcgagggagaaggagagggagagggagagggagagggagagagagggagtggaagtggaggaacgagcgagagaggaggagggagtgtactgattaatcggtatctttctatttatgtgcaagtggaattataataaggtggcctctccttttctccccttctttttct

SEQ ID NO: 110 - DNA, 617 bp, Eucalyptus grandis
ctcatccgaccttgtgagggaggtggtgcaatcattcatattgtggatcatgttgatctagatgcttggagtgttcctgaagttctcagaccactttatgaatcgtccaaaattcttgcacagaagatgactgttgctgctttgcgccatattagacaaatagcccaagaaagtagtggggagattcagtatggaggtagccgacaacctgcagtcttgaggacgtttagtcagaaattgtgcagggggtttaatgatgctgtgaatggctttgtggatgacggttggtctgttctaagtagcgatggggtagaagatgtcaccattgctgtcaactcatctccaaataaatttcttggttcccaatacaatgcaaccatatttccaaattttggaagaggagtgctctgtgccaaggcgtccatgcttcttcagaatgttccgcctgctgtgcttgtacgctttctgagggaacaccgctctgagtgggctgaccatggaattgatgcatactcagctgcatctttgaaaactagttcttatgccattccatgtgtgagacctggtggtttccctagtagccatgtcattttgcctcttgcccacactgttgaaca

SEQ ID NO: 111 - DNA, 380 bp, Eucalyptus grandis
gctcttcgaacactttctccacccctacccgaaggattcggacaaagtcatgctggccaaacagacagggctcactagaagccaggtgtcgaattggtttataaatgctcgagttcggctttggaagccgatggtggaggagatgtacacggaggaaatcaaggagcaagaacagaatgggggaggagcagaggaaaaaccaagcaagagtgaacgcgaggactcagcatccaagtcctctggcctccaggacaaggcccccaactccaatgagaacagcaccaagagcttcaaaccaaaggagatcacctcgaggaaccacgacacccctgccatctctactaattcggcttcctccatcgggggaaacgtccgcagca

SEQ ID NO: 112 - DNA, 348 bp, Eucalyptus grandis
gacaaattgatgaaacatgaatatggatgggtgtttaacactccggttgatgtaaagggcctcggtttgcatgattactatagcatcataaagcatccaatggacttgggcagtgtgaagacaaggctgaaccggaactggtataagtcaccgaaagaatttgcagaggatgtcagacttacgttccgtaatgccatgacatataaccctgaagggcaagatgttcatgtcatggctgagattctgtacaagatatttgaggatagatgggccattatagagtcagattataatcgtgaaatgcggtttgcgttagactacgacatgggtcttcctacacctacctca

SEQ ID NO: 113 - DNA, 350 bp, Eucalyptus grandis
ccctcatacggaaatgggtattctcctccacaatatggcaatggacctgcatatcaccctatgccaacatactacccgatgggctacaggatctgtgctggatgcaatacagagattggtcatggacggtttttgagttgcatgaatgctgtttggcatcctgaatgtttctgctgccgtgcttgcaccctgccaatttctgattatgagttttctttatcaggcaattatccttaccataaatcttgctacaaggaacactaccacccaaagtgtgatgtctgcagtcactttatccctacaaaccttgccggtcttattgagtacagggcgcatcccttttggagtca

SEQ ID NO: 114 - DNA, 534 bp, Eucalyptus grandis
acatggccagaggatatttgctcggtcaagagcgacatgttcgattctgaaagtccgcattacactgacgctgcccactcttcgctcttagagcccggcgattcttcctatgctttcgaacctgaccattcggacctatctcaagacgaagaagataatttgagcaagagccttttgtccactcgcaattacccaaagctcgaaaactctgactacgccatcctgcctccaaattcgtgtaactttggattccatgctgaggatcctgccttttggccttggtcatactgaaggcgtccttgatgccgttcactccctttgttttcttgtatcatatatgaggggatacgctataagtatgcaataagctccatcaatagctagcatctgtccaaatgctgtagtgagctttctcaaggaagttggaacctgtgttgatttccttttctttaggttttgtccttcaatgggatcgtctgttttctatgtaaactaaataaagaaaccttgtttatcaatgcaaaaaaaaaaaaa

SEQ ID NO: 115 - DNA, 450 bp, Eucalyptus grandis
aagaaggtaaactcgggcacagcaacagtagcaatagcttggacaatgggaaatatgtgaggtacacgcctgagcaggttgaggccctcgagaggctctaccacgagtgtccgaagcccagttcactccgtcgccaacagctgatcagggagtgtcccattctctccaatattgagcccaagcaaatcaaggtctggttccagaaccgaagatgcagggagaagcagaggaaagaagcttcccgtttgcaagctgtgaacaggaagctcactgcgatgaacaagttattgatggaggagaatgataggttgcagaagcaagtttctcagctggtgtatgagaatggctatttccgccaacacacccagaacacgacgcttgcaaccaaagacacaagctgtgaatcggtggtgacgagcggtcaacaccagttgacatctcagcatcctc

SEQ ID NO: 116 - DNA, 501 bp, Eucalyptus grandis
ggaagaaaatatgcagcatttgaaggacgaagctgcgaacatgatgaagaagatcgagctcctggaagattcaagaaggaagctccttggtgaaggtctaggatcatgctcgatagaggaactgcaacagatagaacagcagctagaacggagtgttatcagcattcgtgctagaaagactcaggtcttcaaggagcagattgacaagcttaaagagaaggagaagatgttgacagctgagaatgcaatcttaactgagaagtgtggaatcaagcccccacaaagagcaaatgagtgcagggatagtccacttctcagagagagcaccccgagttcggaggtggagaccggtctcttcatcggaccaccagagaccagatcgaggcgcctgccgtttcagaattaaaaatatagccctagcctctcaaagtttcaaaatgtcacaaggcagacgggcagaaaacaaccaccgaccatggccgaagaacaccaccaccacct

SEQ ID NO: 117 - DNA, 372 bp, Eucalyptus grandis
gacaaggatccgaagagacccgtgagggacccggtcttcgccgccgtcccagataagttcgtcgcgagcatgatgaagcggtgcggcctgatcttgacgaaggttatgaagcacaagcacgggtgggtgttcaacacccccgtcgacgcggtcgggttagggcttcacgattaccaccagataatcaagaaccccatggatctcggcaccgtgaagacgaatctcgagaggaatttctaccactcgccgcaggagttcgcggccgacgtgaggctgaccttcaacaacgcattgacgtataaccctaaggggcacgacgtgcatcacatggcggagacgctgctcgtgcagttcgaccagatgttcgatcct

SEQ ID NO: 118 - DNA, 378 bp, Eucalyptus grandis
gtgagcctctcccgtgtcgagaagcacgcgtcgagcgccatgaacaagctccacgaagccgccatgaaaggcgacctcgcggccctccaagacctgctgttgcaggacccccagatcctccacaagaccacttcttcgtcctccgacggcacgcccctgcacgtttcctgcctctcgggccacgcgtccttcaccaaacacctcctcacccacaacccggagctcgccaaggaggccgactcccgcggctccctgcccctccacgtggcgtgcgcgaagggcgacgtggagatcgtcagggccctcgtggccgtcgacccggccgggtgtctccggtatgatcgcgaggggaggacgcctctgcacttggccgccatc

SEQ ID NO: 119 - DNA, 414 bp, Eucalyptus grandis
cgacgacctcgacaacgagagggcgtcctcccgcggcggcggcagcgacgaggaggacggcgacatgtcgaggaagaagctccggctgtcgaaggaccagtccgccgtcctcgaggagagcttcaaagagcacaacaccctcaatcctaagcaaaagctggcactggcgaagcagctggggctgcggcccagacaagtggaggtctggttccagaacaggcgagccaggacgaagctgaagcagacggaggtggattgcgagtacctgaagcggtgctgcgagagcctgacggaggagaaccggcggctgcagaaggaggtgcaggagctgcgggcgctcaagctctccccgcagttctacatgcaccttttcccttccaccacccttaccatgtgccccttctgtgagcgcgt

SEQ ID NO: 120 - DNA, 313 bp, Eucalyptus grandis
gccgattacgacgagggcggcgacgacaatccggggagccgccacccggtgacccggcagttcttcccggtggaggaggaggaggagctggaagaggatggcgagcgggcaggaatggggggagccgcagtgccgccggggttcccgagggcgcactgggtcggagtcaggttccgccagtcggatcaccatccaatcggatcgggcaagggctcaccgatattggagggttcacagcccatgaagaagatcaggaaagggccgaggtcgcggagctcccagtatagaggggtcactttttacaggcgaactg

SEQ ID NO: 121 - DNA, 415 bp, Eucalyptus grandis
cgacgacctcgacaacgagagggcgtcctcccgcggcggcggcagcgacgaggaggacggcgacatgtcgaggaagaagctccggctgtcgaaggaccagtccgccgtcctcgaggagagcttcaaagagcacaacaccctcaatcctaagcaaaagctggcactggcgaagcagctggggctgcggcccagacaagtggaggtctggttccagaacaggcgagccaggacgaagctgaagcagacggaggtggattgcgagtacctgaagcggtgctgcgagagcctgacggaggagaaccggcggctgcagaaggaggtgcaggagctgcgggcgctcaagctctccccgcaattctacatgcacctatcccctcccaccaccctcaccatgtgcccctcctgtgagcgcgtc

SEQ ID NO: 122 - DNA, 385 bp, Eucalyptus grandis
ggagagccagaagctcatggaggcggtccagaacggcgacgtctcggccgccgtggacctcctcgaccaagaccctctcctcctcgacaggatcatcgtcctcggcgtctccgacacgcccctccacgcggcctccgtgctcggccacgccgacctcgtccgggagctgctgcgccgcgccccccggctcgcctccgagcaggactcccggggcaactcgccgctccacctggccgccggcaagggccacggcgagatcgtgggcgagctcctgtcggccgacccggcggcggcgtcggcgcggaacctcgacgggcgggcgccgatccacgtggcggcgatcaagggccgggtcgacgcggtgggacggatggtcggggccgtc

SEQ ID NO: 123 - DNA, 282 bp, Eucalyptus grandis
gtatagcgggtatttaagtagcttgaaacaagaactctccaagaagaagaagaaaggaaaactacctaaggaagcccggcagaagctgcttagctggtgggagttacactacaaatggccatatccatcggagacagaaaaggtggcattggctgaatccactggtttagaccagaaacagataaacaattggttcataaatcatgttatagagtgttgggtaaagtccatggcaaccctaatgcaagaaatatttttgatgactaaggtcattcttaggtc

SEQ ID NO: 124 - DNA, 383 bp, Eucalyptus grandis
gcactttcagcttcggcatcctgaaggccggcgagggaggtgatggtgtcgcggacgacgaactcggggtgacgaggcagctgttcccggtgagggaggtggatgcggatatggagtggtgcggcgagtcgtcctcgcttgataagaggagcgatgtcttcttggttggtgcttgtaaggaaaaggaaggtccgaggctggcgatgccgcagcagcggaggaagagcaggaggggaccgaggtcaaggagctcgcagtatagaggggttactttttataggaggactggaagatgggagtcgcacatatgggactgtggaaaacaagtgtatttgggtggattcgacactgcacatgctgcagctagacctatgatcgagctc

SEQ ID NO: 125 - DNA, 350 bp, Eucalyptus grandis
ttccgaagatatgcagttcatggtgatggacggtcttcatcctcaaggtgccgctttatacatggatggtcactacattggtgatggtccctaccgtttgggcccgtaggctgtcaatccatgcaccataatcggatatataggtttgatgttcttgcagggtcctctggtggttgcttcgcctttacattatgtgtcctagtgtatgaattgttagttgtgccacctgatcaaatcatgttatagagtgttgggtaaagtccatggcaacccaatgcaagaaatatttttgatgactaaggtcattcttaggtcatatctatgtatcctcttatatgtcttggttttcc

SEQ ID NO: 126 - DNA, 539 bp, Eucalyptus grandis
gctgccttcgaaggcatggactcgctcccgagcccaaggaagaagaagaaccagctggtgaacagaagaaggttcagtgatgaacagatcaggtcactggagtctatctttgaatccgagtcgaggctagagcctcggaagaagctgcagctcgctagggaattggggctgcagccccgccaggtggccatttggttccagaacaagagagcccgatggaagtccaagcagctggagcgtgacttcgccattcttcgcgccaactacaacgccctctattcccggttcgagtctctcaagaaagagaagcaatccttggtcactcagattgagaaactaaaccaactcgtcgagaagccgcaaggagagggccagagctgcgggcatgatttggcaacgaacagcaccgatcgcgaatccgacaatggggttcccaagtatgaagacagtcagcctgtatttccggataaactaacgcgtttgatgggaatcccatgtgaggatgactactttggcctaaagagagcagagcctcctaa

SEQ ID NO: 127 - DNA, 493 bp, Eucalyptus grandis
taacctcacggacaagctgcttcacaagggaaatgagaaggagagttccgagtcgtccagcaaatcatctcaagggctattccagaaccccattgctgattctgtttctgaggacgaagtgtccagagtccccattcctacatggccagaggatatttgctcggtcaagagcgacatgttcgattctgaaagtccgcattacactgacgctgcccactcttcgctcttagagcccggcgattcttcctatgctttcgaacctgaccattcggacctatctcaagacgaagaagataatttgagcaagagccttttgtccactcgcaattacccaaagctcgaaaactctgactacgccatcctgcctccaaattcgtgtaactttggattccatgctgaggatcctgccttttggccttggtcatactgaaggcgtccttgatgccgttcactccctttgttttcttgtatcatatatgaggggatacgctat

SEQ ID NO: 128 - DNA, 627 bp, Eucalyptus grandis
ccgagaagaggacccccaagaagagagggaggaagccaggcctcggccgcgacacgccgctgaaccacgtggaagccgaacggcagcgccgggagaagctgaaccaccgcttctatgcgctgcgagcggtggtcccgaacgtgtccaggatggacaaggcgtccctgctctccgacgcggtgtcctacatcaacgagctcaagtccaagatcggcgatctggagtcccagttgcagagagagtccaagagggtcaaacaggaggtcaccgacgcaaccgacaacctgagcaccaccacctccgtcgaccatagtagcccatccggatgcggcggttctttgctcgaggtggaggttaagatcgtggggtgcgacgccatgataagggtccagtcggagaatgcgaactacccatcggcgaggttgatggcagcgatgcgggacctggagctccacatacaccacgccagcctgtcgacggtgaacgacctcatgctccaagacgtggtggttagtgttccggaggggctcaaaggggaggaagatctcagagctgcgcttcttcgggcactggaacaatgacggtcggagaaattgccgggggagagagagagagagtacgtactgt

SEQ ID NO: 129 - DNA, 385 bp, Eucalyptus grandis
ggaagatgacaaactagggagaaatagagcatctgcaaacgtggtacaatcatcttctgtaaaggggaggccttctggtggaactcttgttgtatgccctactagtgtgcttaggcagtggggtgatgagctgaaaaataaggtttcagagaaggctaagctatctgtatgtatgtatcatgggaccaccaggaccaaagatccatatgaattagctaattatgatgttgttctgacaacatattctatcgtaagcatggaggtaccgaaacccgctggttttaaagatgagaaggatagtctgcaagatgatgatgatgcgttttttggtaggaagagaaagcactctgctaaatctgagaaaagacgcttgaagaaagaaatg

SEQ ID NO: 130 - DNA, 345 bp, Eucalyptus grandis
tttcagattgtttatcaattggttgctagacttcaactccgcagattctgctattgatagtgcacattttcagattttgacagcatttgcgaatgcattccatgctttgcaacctctgaaagttccagcgttcagctttgcatggctcgagctggttagtcacaggagtttcatgccaaagattctctcagggaactctcagaaaggttggccttacttccagcgcctgctggttgacttgtttcagtacatggaaccattcttgaggaatgctgaacttggtttgccggttcattttctgtataagggaacacttagagtgctgcttgtgctgcttcatgattt

SEQ ID NO: 131 - DNA, 766 bp, Eucalyptus grandis
gccgtctgaggagtcttgctctctctctctctctctctctctcttcttatcttcttctcccccaaaaccccatcggacccaaaaaccctaacgaagatgaatagggagaggcttatgaagatggcgggttctgtccgcactggtggaaagggtaccatgagaagaaagaagaaggctgttcataagaccaccacgacagatgataaaaggcttcaaagcaccctgaagaggattggggtgaatgccatccccgcaattgaagaagtcaacatttttaaggatgatgtagttatccagtttttgaatcccaaagttcaagcgtctattgctgcaaatacctgggtagttagtggttctcctcagaccaagaagctacaggatatcctccctggcatcatcaaccaattaggtcctgataacttggacaacctgaggaagttggcagagcaattccagaagcaggtgcctggtgcggccactggttctggtgccactggaatgcaggatgacgacgacgacgaagtccccgagcttgtacctggcgagacttttgaggccgccgctgaagagggtcaggcgactcaggtgactgaggcgactcaggtgactgaggccactaaggtgactgaggcaactccggcctcctagagagagggattgttattgtcatttcaatacttgtagtgctattaaaatccttattttctctcatttgtctgtctttccattgtacttttaacgaactgttttaatctcgtgaggcttg

SEQ ID NO: 132 - DNA, 162 bp, Eucalyptus grandis
ggatcttgccaaaagggtgactcctgtgagtacgcgcacggcgtatttgagtcgtggcttcatcctgcacagtatagaacaagactgtgcaaggatgagactggatgtgctcgcaaagtttgtttctttgctcacaagcccgaagaattaaggcctgtctat

SEQ ID NO: 133 - DNA, 518 bp, Eucalyptus grandis
attatatcgtcgtgtctatttcccgaaatatttgcataactactagctgggtcctgtcgtaagccttacaataaatctactattagctgagtattgggtgtcgaataatttgcacgaagccacgaactattggcaatcgatctcatggcttcctcgagcggaacgtcttccgggtcaaccttgatccagaactcgggatcagaggagagtctgcaggccttgatggatcagaggaagaggaagaggatgatctccaaccgcgagtcggcgaggcggtcgcggatgaggaagcagaggcacctggacgatctgatgcttgtggtggctcagctcaggaaagacaaccagcagctaagggacaacgtgaacgtggtgaaccagcattacatgaccctggagaccgagaactccatcttgagggtccagatgaacgagctcaccaacaggctggagtctttgaaggatatactcggtatcctggatgccggagatggtggcagaccaggaaatggtggcgg

SEQ ID NO: 134 - DNA, 413 bp, Eucalyptus grandis
cctcgtcctctcccccccccaccggagcttcgaaatcgagcggcggcgacgcgatgacggacggccacctcttcaataacatctccctcggcggccgcggcggctccaaccctggacagataaagattttctcaggagggatttcatggaggagacaaggaggcggcaaagcagttgaagttgataaatctgacattgtcggggtgacctggatgaaggtgccgaggacaaatcaattaggtgtccgcaccaaagatggtttacattataagttcactggattccgagacccggatgttattagtttgaccaactttttccaaaatacctgcgggttaactccggaggagaaacagctttctgtgagtggtcggaactggggagaagttgatttgagtggtaatatgctgaca

SEQ ID NO: 135 - DNA, 278 bp, Eucalyptus grandis
agactggggcccatggggcccaaaactctctgcaatgcttgtggtatccgttacaagacaggtcgcctctttccagagtaccgtcccagtgcaagcccaacatatgtcccttctcttaacattgtatccaatgaaatcccttcaagccatttatggctttcccttcttcaaaaataaatcttttcaaccattgtcactcccacacgtatccgactcacagtaaggttgcaaaaccacgtctatgttgtccaaccttctccaaaagagtggcagagtac

SEQ ID NO: 136 - DNA, 237 bp, Eucalyptus grandis
ccggggtggcaatcgatgtgaagataatgggttgggatgaagtggttcgagtagagagcggacggaaggatcatcctgcagcaaggttaatggtggctcttcaagaattgaacttggagttgcagcatgctagtgtttctgtggtgaacgagctcatgatccagcaagccacagttaagatggggagtcagttgtacactcaggagcagctcaaggcagctctattggccgtaatct

SEQ ID NO: 137 - DNA, 371 bp, Eucalyptus grandis
ccaagccgccgatgaagaagcagaagagcaagcccgctgctgcttcggagacggccggaccggcccgacggtgcagccactgcggcgtgcagaagaccccgcagtggagggccggccccaacggggcgaagacgctgtgcaacgcgtgcggggtccggttcaagtcgggccggctgtacccggagtaccggcccgcgtgtagccccacgttttctagcgagctgcactcgaaccaccaccgcaaggtgctggagatgaggcgcaagaaggagtcaatgacgacgacggcactgggtcagcccgagcccggtcgggcccgtgcccagcttttgagggcaagggtgggttcttcctggcgccctcgggaaata

SEQ ID NO: 138 - DNA, 947 bp, Eucalyptus grandis
cagggaagacctgttccactgctaatgctgagggtcgctaagacagtggatgcttatctcggcgagatcgccacctacagtgaggtcagcattgcaaagttcaatgggattgctactatcgtgcctaaaggagcccgaaaggttgacgatgatctttatcgtgcgattgatatctacttgaagtctcacccgaacctcgatgaagatcatcgtcaacctttcgggctcctttaggccgcgggcctcctccgctgtggcaagagctgccgcctccggtggatcaattacctgcggccggacctcaagcggggcaacttcaccgaagaagaggatgagatcatcatcaaactgcacagccttcttggtaacaaatggtcgctcattgctgggcgtttgccggggagaacggacaacgagatcaagaactactggaacacgcacataaggaggaagcttttgaaccgaggcatcgatccggccactcacaggctgatcaatgagcccgcacaagatcaccatgacgagcccaccatttcttttgctgctaattctaaggagatcaaagagatgaagaacaacgcagagctcaatttcatgtgcaacttagaagagtcggcagacgtggcatcgtcggctcgagaaaggtgtcctgacctgaatctcgagctcggaatcagccctccttctcatcaactgcatcagcctgagccactcttgagattcactggtaggaaaagtgatttgtgtctggagtgtaatttggggttgaaaaatagccaaaattgcagatgcagtgttggggtgatcgagagtgaaactagtgttgggtatgacttcttgggcttgaaggcaagtgttttggattataggagctgaattttggtgaagaagatggataattgtgcagcgaagagatgaggcagagattgttattagttgaaatctgc

SEQ ID NO: 139 - DNA, 509 bp, Eucalyptus grandis
caggaatcgaaaaaaaccataaaaaaaaaaaaaaaagacgcagtttttatcgcctgtcgaacagaaaaaaccccccctccaacaacaagattttcccccttcaaaaagtcaagaatcgtttccccaccccgacagaaataaaaaagaacagaaaaaaaaacgtccagatcccatttgggagctcctcggtcgcgacccttttggtgattcctcgtgcgcccacgaagggtcctcgggtcgaatatccgcagattctgggttatcgttgtctttcggatcgggtttggtatattgggcgcattgggaggacgggaaaaattcaagaatgtccgttctgtcaaaaagcgattctgttgagattagggaggtttgggaatacaatctggaagacgagttttcgttcattcgcgaaatcgtggatgattatccctacattgccatggacaccgagttccctgggatggtccttcgaccggtggggaatttcaagagcagctccgagtctcatt

SEQ ID NO: 140 - DNA, 426 bp, Eucalyptus grandis
ccatgagaagaaagaagaaggctgttcataagaccaccacgacagatgataaaaggcttcaaagcaccctgaagaggattggggtgaatgccatccccgcaattgaagaagtcaacatttttaaggatgatgtagttatccagtttttgaatcccaaagttcaagcgtctattgctgcaaatacctgggtagttagtggttctcctcagaccaagaagctacaggatatcctccctggcatcatcaaccaattaggtcctgataacttggacaacctgggtagttagtggttctcctcagaccaagaagctacaggatatcctccctggcatcatcaaccaattaggtcctgataacttggacaacctgaggaagttggcagagcaattccagaagcaggtgcctggtgcagccactggttctggt

SEQ ID NO: 141 - DNA, 310 bp, Eucalyptus grandis
tactgggaaactctcatgttcttccaatctgaagagcttcttcacaacagctgcgtcagcgaggtgatttccagattcaatggtccgagttcgccggacgcggcggcgctgccggtagcatctaaaagcattgacctggaaagaaataggaggaagaagctcaatgaaaggctcttcgcactcagagcccttgtacccaagataagcaagatggataaggcttcgatagtgaaagatgctattgattacatccaagacttgcgtgaacaagaaggaagatccgagccgagatcgcagagctcgaatctgt

SEQ ID NO: 142 - DNA, 622 bp, Eucalyptus grandis
ccggggtggcaatcgatgtgaagataatgggttgggatgcagtggttcgagtagagagcggccggaaggatcatcctgcagcaaggttaatggtggctcttcaagaattgaacttggagttgcagcatgctagtgtttctgtggtgaacgagctcatgatccagcaagccacagttaagatggggagtcagttgtacactcaggagcagctcaaggcagctctattggccgtaatctgaggatctttgaaggatttcgttcaatgcaagttggcatcgactagacaatggaattgaagtttctccattgaaagcaagaacctgcccaatattttcaggttccgggtggtgcgaactctttgaacaatgggctttgtttagttgtgtggcttcgtctggtagattgaacccctagattgcaagttgaagtaaatacctagttctagcagatagtaattttttttccacgttgatctcctgcctgtcttcgatgtaaatagatgctccaaatttgaaactgatggggccgtttccttatcctttgttagcttgttctgccgtttgttgggttcaaccaagatcatgtctcttgtacaccaagcatcctgtaatcaatgcgcaag

SEQ ID NO: 143 - DNA, 369 bp, Eucalyptus grandis
cggaatttatagttgtcttaacttagatgctagcaatggcggaagttctgcaattgatccatctatctcaagtgccattttagacgatttttgcacaataaaggatggaccttttccgaatctttcagattgtttggtgggcaacttcagttcaagccaagatgttcagtctcagattacttctgcaagtcttgcagattctcaggctttctcaagacaagacttccctgataattcaggcggtacatcttcgagcaatgttgattttgatgagagtagcattttgaaaaacagcacatggcaacagcaagtagccccacctatgcgcacctatactaaggttcaaaaggcaggatcagtcggaaggtc

SEQ ID NO: 144 - DNA, 768 bp, Eucalyptus grandis
aagaattcgacacagtcaactttggaatagcagtgtcgagaaacagagtgttgctccctatgtgactggctaacatgtaaagcaggagattgaaggcagctccagcccaggctgtttcataaagtataccagaagttcttgtcgtttcctggtacaggggatagatcctagcaattctcggtacatattggccataaatgacgaacttcagtgactccttcgacattaaaggaacctggtacgtcatcgctgctgccgaggtacacattcgcgagaacccatctctcgttggtttccaattcgaagttcgtcgcgtcgccctctcgatctttgaggaaagcgaggacagggttgcgctctgttcgcgccatggggtcttctgcttcttcccagaggcccgacaaccttcaagacaaagttggccctgtctccgtgagtgatgaagagtggaagaaacgcctgactccggagcagtattacgttgcccggcaaaagggcactgagagggctttcactggggagtattggaacaccaagacccccggaacttatcattgcgtttgctgtgacacacctctatttgaatcaaatacaaagttcgatagtggaactgggtggccatcttactatcagcccatagggaacaatgtcaaatcaaaattggatctctcgatcattttcatgccacgccaggaagtcctgtgtgctgcttgcgacgcgcatcttggtcacatctttgatgatgggccacccccaactggtaaacgc

SEQ ID NO: 145 - DNA, 546 bp, Eucalyptus grandis
gaaagaagaagggttggtgatagaggagatagaataagaagggatggcgcagcttatggtggacaagtgcggggagggcttgctggtggcggtggaggcacagaaggcggtgccggcgccgttcctgacgaagacgtaccagctggtggatgacccctccaccgaccacatcgtctcgtggggagacgacgactccaccttcgtcgtgtggcgtccccccgagttcgcccgcgacctccttccgaactactttaagcacaataacttctccagcttcgtccgccagctcaacacctatggttttaggaagatagtaccagacaggtgggaattcgccaacgagttcttcaggaagggggagaagcatttactctgcgagattcaccgccgcaagaccgcccaaccacaactcacccaccaccacccgcactccgcctccccgcttagcggccccactccggccttcttccctttcccaagccgcctcagcatctctccctccgactccgacgaccagcattcctcccactggtgcgactcgccgcc

SEQ ID NO: 146 - DNA, 640 bp, Eucalyptus grandis
cgcggccgcgtcgacgaagaacacctcagaatcaacaccactccccaatttctctctctaagatcccacacccaaccgccaccctcaatctctctctttctctctcttcttcagtgtctgccatggctttggaggccctcagctcccccaccgctccctccgccccgttccaattcatgaaggactcctcccccgccgccgccgccgccgccgcctcctcctcctcctccgcctacgacctccccctcgccgagccctgggccaagcgcaagcgctccaagcgcccccacaacccgccctccgaggacgagtacctcgccctctgcctcatcatgctcgcccgcggcggcgccggccggaccctccccccgccgcctccccccgcggtctcttccgaggcggccaaggtggcctacaggtgccccgtctgcgacaagggcttcccctcctaccaggccctgggcggccacaaggccagccaccgcaagcacgcctcctccgccgcggccgccgccgggggtgacgaccagccgaccacctcgagcacctccgcggcgacgacctcctccggcgtctccgggaaggtccacgagtgctcgatctgccacaagagcttccccaccggccaggcgctcggcgg

SEQ ID NO: 147 - DNA, 236 bp, Eucalyptus grandis
atcagcagcagcagatggccgaggcaagagacgctcactcttcttgagatcagatctcgcctcgatcccaagttcaaggaggccaatcagaaaggacccttgtgggacgaagtctccaggataatgtctgaggaacatgggtacaatagaagcggcaagaagtgcagagagaagtttgaaaacctgtacaagtactacaagacaactaaggaaggcaaagctggaaggcaggatgg

SEQ ID NO: 148 - DNA, 520 bp, Eucalyptus grandis
ccggagccccagaggaagttcgacacttgtcatcgcccagcgcgactcgcagattcggttcgatctcggaggggaaatccaacttgcccgaaatagcaatcgcagcttgcagaatgggtcctcaaatgaacttccgaaacttggccgatgtgccagcagccgaaagaagcaccggagggcaaccaggaattcccctattatctcgacaatcctcagtatattccttgactttcaatgagtttcagaacacatggagtggactttctaaggatattggatccatcaacatggatgagttcctgaagaacatatggacagctgaggagagccaactacagctacaagacatggcgccttctggtaatggaggggaaggaggtggtcaagtagggaatttgctgagacaggggtcattgactctgtcgcggactattagtcaaaaaacagttgatgaagtgtggagagaattattcaaagagacggaggatgtgaaagaagggagtagagaaggaggtgacat

SEQ ID NO: 149 - DNA, 148 bp, Eucalyptus grandis
gacttcgagcggaaccgggcggagggggtcgactcggcccggttcgcggagctgatgatatcgtccggcctactgtgcaacgacgcggtcatctgggtcaccttccacagcgcctacgacttcgggtacctggtcaagatcctgaccc

SEQ ID NO: 150 - DNA, 443 bp, Eucalyptus grandis
cacaacacccccatatcagtaaacacttctcgctgctccagccagcttctgtctcatataaacactagccccacctcactcattatccgcttcgctcctactcaactgctatcgcgctatcccagcgcagacgtcctcccatgaacttctccgacaaggaagtgcagctcgcgtccgaccacccgaagaagcccgccgggagaaagaagttccgggagacccgccaccccgtgtaccgcggggtgcgtctgcgcgactcgggcaagtgggtctgcgaggttcgcgagcccaaaaagaagtcgaggatctggctcggcaccttccctactgtggagatggcagcgagggcgcatgacgtggcagcgctcgcgctgagaggccagtctgcctgcctcaacttcgcagactctgcgtggcggctgcccaagccggcatcgacggat

SEQ ID NO: 151 - DNA, 341 bp, Eucalyptus grandis
ggcatggacagtaggacttcgagtcgcatctctggggtgactcttcaggaggtcccgccaacttctagccaggttcctgagattccaccagctttgggggcctcagcaaatgatccctcatctgccgtatctgaactaaaggctccgtcacagggtactgctaaggtcactactaaccagtttccagatatgggtatgctcgcaggagcacaggagtctgaagcagtctccgttaatcaggcagataccgttatgactgggatctctcaaacacaagacatggtgctggaggatattgctaatatatccagagatgactacatgggagcagatctgcataa

SEQ ID NO: 152 - DNA, 603 bp, Eucalyptus grandis
gaaaagcgtacgcgaggaggcagcatgcgtggctcaccggagctaatgaggttgatagcaagactttttcgagagctattcttgcaaagagtgctcgtattcagaccgtggtttgcatccctcttctagacggcgtagtggaatttggcaccacggaaagggttcaagaggacatttcactcgtcaatcatgtcaaaaccttcttcgttgaccaccacccccctcacccaccgaaacccgccctttccgaacactcgacctccaaccccgccgccacctcgtccggccaccaccgcttccactccccgcccgtcccctcctacgccccggccgatccacccgctgcagccaaccaaggggatgaggaggaagaggacgacgacgacgacgaggaggagggagagtccgactccgaggccgagaccggccggcagggggcggcggcggcagcgcagaaccctcacggcgcagggcccgcaaacaacgccgagcccagtgagttcgagatgtctgaggacatccggctcggctcgccagacgacgggtcaaacaacctggactcggacttccccatgctgaccataaactcgacggccgcggatc

SEQ ID NO: 153 - DNA, 984 bp, Eucalyptus grandis
gggatgggtcctgtagggagccgaaagatggagaagaatccgaagcgactcgaatccttaatttgagactcgaggacgagggccagcagaggatgaggaaacgggtgctggacaagttgcacaccgtctttggtgggtcggatgaggacaattatgctctcggcttggaccgggtgacggacatggagatgttctttctggcgtccatgtacttcttgtttccctcgggagaagggggtccaggcaaatgttttgcctcggagaagcatgtatggctgacagatgcactcaagtcgtcttctgattattgcgttcggtcatttcttgcaaagtctgcagggattcggacaatagttttggttccgactgacgttggggttgtagagttgggttcggttagatctgtcccggaaagctcggagctggtgcagaccataagattgtctttctcgacgaattcatttatgtcggttaagccaatagctgccttacccatgacgaatgaaaagaaggacgaaaacgcacccttctctaatttggcgttggcaggtaagggtgaggcaatctccaagatatttggtaaggagttaaccacagttaacagtcctggccattatagggagaaacttgccgttagaaagatggactccaggcaatcgtgggaacctcaccataacggaagtaaactcccattttcaactcctagaaatggcacccaagacacgagttgggctcatcatgctcatggcgtaaagcagttgagtcctgtggaattttatggctctcaaacctcagccagtaaattagaggagcggatgaacagcggtaggaatgattttggattgaaccgctacccaacaccaaagcaggtgcaaatgcaaatcgactttacaggtgccacttcaaggccttctgtgataacccgaccattcactgccgactctgagcattctgatgttgaagcttcatgcaaggaagagcagg

SEQ ID NO: 154 - DNA, 1144 bp, Eucalyptus grandis
ccgaactggactcccatctccggcgagtgaaacgatcgaggaggaggaggaagaagcgacgatgatgatgatgacgatggccgccggcggcggcgaccaccacgcccgctccaccccgaccgtccagatcccccccgtgtgggacccgctcgacgacccggccaccggcggctgcggcgggccgtactcaccgtactccccgtactccccgtactccggcggcggcaatgccggcggggccgcgggaggaggggagtgctgcaacgacctgacggcgttgcggcggttcctgccgtcgaaccaccaccaggacgaggaggacgaggaggacgggcgggcgcccggggaggacggcgtgctgggctgcgacgagttccggatgtacgagttcaaggtgaggaagtgcgcgcgcgggaggtcgcacgactggacagagtgcccgtacgcgcaccccggcgagaaggcgcgacgcagggacccgcgccggttcttctactccggcactgcatgtcctgatttccgcaaaggcgcgtgcaagaagggtgacacgtgcgagttcgctcacggcgtgttcgagtgctggctccacccggagcgataccggacgcaggcgtgcaaggacgggcaaagctgccgccgccgcgtctgcttcttcgcccactcccccgaccagctccgggtcctccccgcccaccagcagcagcagcagcagcagcagcagcagcagcacagtcccaagagcgccaccgactccgagttcgggtccccggtccgcccctccgctgccgcggcggcggccttcgactcctacttcaccaagccgtggtcggcctccttcatatcctcgcccacctcgatcctgaccacctcgtcgcccccgatctcgcccccgaccaactcgcccccgatgtccccgaaccaacgcggcggctgctgcgggtcgcccggatcggtgagcgagctggtggcctgcatgaggaatatgcagatcgccaagatgaagatgagcccccgcgggcagatgggggggtctctcttcgggtccccgctccgacccgggtgccaccttgcggcgccggtgactcccagggccgagtcttcaccgcggtacgggcaactcggcggtggaggtggaggcgggctc

SEQ ID NO: 155 - DNA, 238 bp, Eucalyptus grandis
tattgataagatggcggaagcaccggcgagtccgatgggcggtgggagccacgagagcggcggcgagcagagcccgcagttcgggcggcgtgagggagcaggataggtacctgccgatcgcgaacatcagccgcatcatgaagaaggcgctgccggccaatgggaagatcgccaaggacgccaaggacactgtccaggagtgcgtctccgagtttatcagcttcataaccagcgaggc

SEQ ID NO: 156 - DNA, 950 bp, Eucalyptus grandis
gacgcttccctcctcccccatcccggccatggcgacccccgacgaacgcccctcctcctcctcctccgccgcctccgccgtcgccatccgccaggtctgggcctggaacctcgacgccgagttcggcctcatccgcgacctcatcgaccgctaccccttcgtctccatggacaccgagttccccggcctcgtcttccgccgccccgccggcgccggcgccggcgcccgcccctccccctccgaccactaccgcctcctcaagtccaacgtcgacgccctctccctcatccaggtcggcctcaccctctccgacgcccgcggcggcctccccgggttcatctgggagttcaacttccgggagttcgacgccgcccgcgacccccacgcgcccgactccatcgagctcctccgccgccagggcgtcgacttcgaccgcaaccgcgccgaggggatcgactccgcccgcttcgccgagctggtgatgtcgtccggcctcgtctgcaacgacgccgtcagctgggtcacgttccacagcgcctacgacttcgggtacctggtcaaggccctcacccgccgcgagctccccggcgacctcccggagttcctcgccgtcgtgcgggtgttcttcggggaccgggtgtacgacgtgaagcacctcatgcggttctgccacagcctgcacggcgggctggaccgggtcgccgccgccctggagctggaccgggcggtcggcaagtgccaccaggccggttccgacagcttgctgacgtggcaagcgttcaggaagattagggacgtctacttcgccaacgacgacgggccggagaagcacgccggcgtgttgtacggcctagaggtctattaggatcaatccccaaaattcaattcattcttttgtaccgtaccaaatttgtgggtacattttgtgaatattgttcggtatcttattc

SEQ ID NO: 157 - DNA, 272 bp, Eucalyptus grandis
gtcctgtctggaggtcttctgagctgagagatttaaaaggtctgtaaaagattcaaggtttcttctacccagaggaaagaacctacttcttcctttatcacccatgggttcttaaacctcgtgacagtgcaatttaaacattagagcaaaacataaaaaaagaagagagctgttcaaatggctactggcgtagaaggcaatgaaggtgtcccagcaaacctgagaaagcagcttgctgtggctgtgaggagtatccaatggagctacgcaat

SEQ ID NO: 158 - DNA, 863 bp, Eucalyptus grandis
ttctactccaccttcatctcacaataaaaaccagcagtccagcacgagcacattatccacttccactccagaactcaagcgcagacgtactccaatgaaccacttcttctcttcttactccgatcccagctcctgcagcctcgactttgctgaagcgtcgtcctcctcgtcgccgctgtccgatggcaggagtgctatggtgcccgggaacttttctgatgaggaggtgctcctggcgtcgcaccagccgaagaagcgcgccgggcggaagaagttccaggagacgcgccaccccgtgtaccgcggggtgcggcggcgaagctcgggcaagtgggtctgcgaggtccgcgagcccaacaagaagtcgaggatctggctgggcaccttccccaccgcggagatggctgcgagggcgcacgacgtggcggcgctcgcgctgaggggccggtccgcctgcctcaacttcgcggactccgcgtggcggctgcccgcgccggcgtcggcggacgcaaaggacatacagcaggcggcggcccaggctgcggaggcgttccggccggcggagtccgaggctgaggacgtgatgtcggggtacgagaagaagtcgccttcggaggagggaatgctgtacgacgacgaggacgtcttcgggatgccggggttactcacgaatatggcggaggggatgctcttgcctccaccacaatgcggcggagatgggtacggcggagaggacgacgggaatctggatgcatacgtgtcgttatggaactattccatgtagtcatttctcaatttcagttgtactttttgtggttagggacgactgggatgccgactaaaatatttttgaatggagtgcg

SEQ ID NO: 159 - DNA, 936 bp, Eucalyptus grandis
gggtggcttaggcttactatagagagggataggagagagagagacaggagagagagggacaggagagactttgttgttgttgttgctgctgttgttgtggtggagtgtggaggaaggaggaaggaagggaggagaaggtctcaagaggggagacatgttcagcttgatcccaacagttccattctttgcttcttccctcctgaccagatccttcaccagctgatatctgaatgagctgaggagagttcatttcttgttcactgtctacttgaatttggatcactttgtaaattgctggaattagatgcctataagaatccagaacttgccaaagaaaaatttcgatcaaggttcgagcctttcgatgcctcatgtcggggtgacttacccaccatggtggagcctgaatgaacagcaacttccgcaatctttacccaaaaatagtggcttgaaagcggaatctccacccatgctccatcatcaagcaaagcatttaggtcttcaactacaagaacaggaatcgtcttcaactcaatcggctggcaattcttgccatgaagtgagcgtcgtgggtggggccaactctcaagatcaaagcatttcatctgaatctggtcaagatgaaagttgtggcaggagctttgagggccagacaaagccaattttcatgttcaacaatccggagattgtcttcaattcttcactagctgatcaaaatcaacctctgattcgtgttccatatccaccagtcgatccttattacggtgggcttctgactgcatacagaccacaggctattattcaatcccaggtaggatctcaaatgttcgggatggcacctggacgtgttccattgccacttaaccttgcagaccatggaccaatctacgtcaatgcaaaacaatattcacggaattcttcggaggaggcagtcac

SEQ ID NO: 160 - DNA, 281 bp, Eucalyptus grandis
agggctatgggtttgttaggttcggcgatgagactgagcagttacgggccatgaccgaaatgaatggcatgtattgttcttctcgccccatgaggattgggcccgctgctaacaaaaagcctattgctacccagcaatatcagagtgcatcttaccagaacagtcaaggaaaccaaggggagaatgatccaaataatacaactatatttgtcgggggtctggatccaagtgtatcagatgaccttttgaggcaagtattcagtcaatatggagagttgcat

SEQ ID NO: 161 - DNA, 291 bp, Eucalyptus grandis
ggatacagaagaagtgccaagaaatgcaaggagaagttcgagaacgtccacaagtactataagaggaccaaggaaggccgtgctggtcgtcaagacggcaagacctacaagttcttctccgagctcgaagccctccacaacaccgccgccggggccaccgtcggaatatcaagcagcttcaagtggtggtggtgctgcttctggcactgcagccctgggcggtctctcggtacccccagtttcgatcgggatatcgttcgccaaccccgtcccaatctccactgtccgcgg

SEQ ID NO: 162 - DNA, 743 bp, Eucalyptus grandis
cctctttcccctcagcgaatggagatggaagatcaccaccagtacaccgcggcagatttgcggcacctcatcaacgcccgtccacctccacccccaccgcacatccagtcgatctccccgcctgagctattctgcggcggcggcggccaccggaacccgacgcagcacttggagtcgatgatgatgggtggcggcgggcttcacaacggccaacgccaaggccacagccacaaccatcaacaccaccaccagtttggccgtgatcattcttctccctcttcggtcgccatggctggtgcggcagggggtttagagagtgagaacggcggaaatgggagatggcctaggcaggagactctcacgctcctcgagatcaggtcgaggctcgactctaggtttaaggaggccaaccaaaagggtcctctttgggacgaagtttcaaggattatgtcggaagaacatgggtatcaacggagcggcaagaaatgcagggaaaaattcgagaacttgtacaagtattacaagaagacgaaggaaggaaaagcgggtaggcaagacggtaagcactacaggttctttcgtcagctcgaagctctctacggagagaacgccaattcgaattccatcctccaagctccatctcttccacactcactccactttcatcctccacccaacatcaatgatattaaccaagatgcgtctcatcatcgtcatcctcatcaactgcagagaccgtgcga

SEQ ID NO: 163 - DNA, 394 bp, Eucalyptus grandis
ctcaaatacacaccgacaaaaaaacaagcattgtcagaatgtcaattccaaactgattttttcggcacgagcgagtctgaatggaacgcggcgatccgaacgttgtcgccgtcgccaggctgaggagggaagactgcgaacgaaccaagcacgactccgcgttcgccacttggaaggtgctcgtaggacctactgattgggaagattattcattggggaaggaaggtgctgccaggtaccgggttcataacctcccgaaaagcccggggccggggatatatgagctcggcgtagccgcttctcatgccaaattgggtcgtgagatcgccaagctcgacccgcgatatatagtcgtggtttaccttgggaaggcggactgtgtcaggaccagact

SEQ ID NO: 164 - DNA, 1017 bp, Eucalyptus grandis
cacctctttgctctttcttccacacggtcaccactttcccctgcaactccccccttctctaaagcccttgcgtgcgagagatattccatggattagggctttccagaaagtaaaacaacctccctcagctcctcttcaccactggtttttgagatgatctgtgtgctcggcgccgttgattattatgtcttattctgacttgctgaacctgctgtttgccgtgggcgtttggtgcaccgcgtatattgcggctgccgttctcgagtcgctccgggtcttccatactctctgttcgttttgatttcgatagctgttttcgaaggctaagatgggctacgcacagctggtcatcggccctgccggcagtggcaagtcgacttattgctcgagtttgtatcaacattgtgaagctattgggcggacaatacacattgttaacctagatcctgcagcagagaactttgactatcctgtggccatggatatcagagaactcatttcattggatgatgttatggaggaacttggactaggcccaaatggtggcctcatgtactgcatggaacatcttgaggaaaacctggatgattggctcactgaggagctggataactatttggacgatgattacttagtattcgactgcccaggccagatagaacttttctcacatgtgccagtgcttcgaaattttgtggagcatttacagcgtaagaacttcaatgtctgtggggtatacttgcttgattcacagttcatcacagatgtgaccaaatttatcagtggatgcatggcatctctctctgccatggttcaactcgaattgccccatgtaaatatcctgtcaaaaatggaccttgtgaaaaacaagagagatattgatgattacttgaatccggaacctcgagtgttgttgtcagagttgaaccaaacaatggctcctaagtttgagaagctcaataaagctttggcagaactggtggatgaatatagcatggtgagcttcatacctctcga

SEQ ID NO: 165 - DNA, 376 bp, Eucalyptus grandis
tatccaaccattatttatcgtccctacagttttatggccaaaatcagcgccgtggagcgcggacattttctgacggtgatcccgcattttgcctggcgactggtgaatccggcaacgctgaaatattttgatgcaccgcacaggccgatgtatatgcaggaatatctttattcaatcagaaatcatcgttataccgccacgatgcttcagcatattgctgaagatcgtgacgggacgagtcattaacccagcatcgagccggttgcaattaaattacggtgtaagtcgaagacgtggctaagatcgtggtgaatatgtccgccaggcgcattttccagatagcgatgcagataatcccgatacataggatgtgcac

SEQ ID NO: 166 - DNA, 689 bp, Eucalyptus grandis
aaatagaagaagaagaagaagaagaagaggatgatgatgacgattgatgaggtaagagacgtcactggtcaatggtcatgcgctgaagctttctacctttaatgcaagcatcgatcgtctcggcgacgtgctctgcttcctcttcactgctggtcagttcatatgcatccacgcgtagttgtcttcaagcgacgcatgcactgattgaagcgtcctcataggcttgtgagatgatccaagacctttcactgcttgtgatactctttataaaggacgagggatggtcttgatgaatcagcccatctagagaggcttccaccatatcacagtttggacttgtgccaatgccaaaaggttcaagcataaagatgggagttccactgcaacattctagtggtatcaaacaattgaatgttcattttcaagagcgggacttgtgttctactcaatcaaccagtcaatcattcagtgaagtgcctaatataggaggaagtactgactgtagccaagccacagttttagaacagacagaacatggtgaaactgaagggcaatcagtgagaggacaagcaaaatcagccttgtcaatgggaactcaggatttagtcttccaacctttagaggtgtgcatcccactccactatgctgaaccatccttgggtggttttatgcccgctgcttatgggcca

SEQ ID NO: 167 - DNA, 1566 bp, Eucalyptus grandis
tatctctagcttagcttggagcttacctactgtactctgcttttcccccccctctctctctctctctcgctctgaacgtttttcagtcatcgagccgagctgaactcctctccccctctctctctctctctctgggtgacccttcttcccttttctctgcgcttccgtcgaagtgaaagagggcgccgaggttgtcgtccgagatgcgtcggagaaggacctctctcctgatttcatgagaccgaccaccacactatgaaagatctaagtttgaggcaatgggaagtggtgtctacacctggcaatgaaggaaagacagcgttggagagctgaagaggacgccttgttacgtgcatatgtgaaacagtatggcccaagggagtggcaccttgtgtctcagcgcatgaacactccccttaaccgtgatgccaagtcctgcttagagaggtggaagaactacctgaaaccaggtataaagaagggatccctcagtgaggaagaacagcgtcttgtcatccagcttcaggcgaaacacggcaacaaatggaagaaaattgctgctgagatcccgggccgtacggctaagagattggggaagtggtgggaggtatttaaagagaaacagcaaagggagcaaaaggagaacaaaggtgctttaccaattgacgaggggaaatacgatcatatattagaaaacttcgccgagaagctagtgaaggagcgatcgaccccagcacttctcatggccacagcaaatggtggcttcattcacaccgattcacctgctcttgctccaactcttctacctccatggctttcaaattctaatggcaccccaactctgaggcctccttcaccgtcagtaacccttagtctctcccctgcaacagttccagcatctcaaccgattccgtggctgcaggcagatagaggactcgatagtggttctctctcactgactggtttgcccaaccatggtccactccctacttcaggagaaaatatcttaatgtctgagcttgcagagtgctgcaaggaattggaagaagggcaccgtgcttgggctgcacacaagaaggaagcggcatggaggttgaaacgactggagttgcagttggagtcggagaaggcgtgcaggaggagggagaaaatggaagagatagaggcgaaaatcaacactctcagggaagagcagaaagcttctttggataagattgaaacagaatacagagagcagctggcaggattgaggaaagatgcagaatccaaggagcagaagctggctgaacagtggacggcgaagcatgttcagctctctaagttaatcgagcaaatcgggtttagaccccggattgcagatcatgacaggcagtgagagttaccgtgagtcgtagtcctttatatacacgtctctttcttgtgccaatcatgtcattcaagtctgcttattagaattccaagactcccttttcctacccaacaaacacctacctttacgtatatctcaataacattacagagcttctcatcctcagctaagtcctctgagacattttgtatggaaat

SEQ ID NO: 168 - DNA, 381 bp, Eucalyptus grandis
agggtctggattcctgttcggtcgaggagctccaacaaacagaaaaccagttggaaagaagtctaaccaagatcagggcaagaaagaaccatttaattagggagcatattgagcggctaaaagcagaggagcggaaactactggaagaaaagagaaagctacttcaagagattgaatgcggcaaaggattgaccccggtctccagcgaaccgcctcgtgaagaaatccgcgcggagtctatggatgttgagaccgagttgtttatagggccaccgaaaagatgaaccgctcagttgcccgttctgcgattgctcaaaataatgaccatagcaacggaaacgcttcttctgctgctcttttcttcttcaatcgtgaggcaag

SEQ ID NO: 169 - DNA, 331 bp, Eucalyptus grandis
ggaggatccagtgggtcggcccgagagtgccagtgagattagccaagagccgggtcaagagtttatggatgaagacgagctcttgaacatgccgaaactgctggacgacatggcggaaggaatgctggtgagcccaccgaggactcagatggcctcagagaacgactcgccggaggactcagatggtggagagagcctgtggagttatccctaattttagaaggtgagatgatcagggcttatcaattacagtagtcctcattgtagacatatacgaatacgatatccattgtatatgatcaggatttcgtcatgatggttgatcgcatcc

SEQ ID NO: 170 - DNA, 950 bp, Eucalyptus grandis
ctggtttcgactcatctctctctctctctctctctctctctctctgatgagctttctctcccttggtgcgtgatgtgtggaggcgccatcatttccgacttcgtcgaggagcggctcgaccgccgccgccccgggagctgccgccccgagaggaagctgacccctcacgagctctggtccgagctcgaccccgcctccgacctcctcagcctcgacggccccgtggcccaaggccaccccaaccctttctctctcgtcgcaaaccaactcaaccaagtgatgaagagtgaagagaagaacagtgaggaggcgggtcacggacacgtgtcggagacccagaagagccagagcaatggccggagccagagggctcgcaagaacgtgtacagagggatccggcagaggccgtggggcaagtgggccgccgagatcagggacccccacaagggcgtccgcgtctggctcggcaccttcaagaccgccgaggaggcggcgcgggcctacgacgaagccgccaagcgcatccgcggcgacaaggccaagctcaacttctccggccccccggccccggcccagccgtcagctaagaagaggtgcgtggctcctgacgagccgaaggatgaggccggagctgcaggatgtgagctgaaggagcggatcgccagcttggaatctttcctggagctggagccaaccgaggagccgctcgagccgggcaccgggccgtccccggctgatctctggatgctcgaagacctcgtcactcatcaccagcaccgtttcgataaccagcttgtttattagataataactgagtttgatcactgatcatggtactttaaactcgtgttctagctttgggatgcttaactatgccatgttttagacgtgtaagaaccgttgtgctttcgagtgccattaatacagtaccaagtatcgtaaaaaaaaaa

SEQ ID NO: 171 - DNA, 376 bp, Eucalyptus grandis
ccagcagaggctgctgcagtactggagtgacgcgctgaatctcagcccgagggggaggatgatgatgatgaatcggttggggcccgacggcaggccgatcttccggcctccgcagccgataaacaccacgaagctctatcgtggagtgaggcagcggcattggggcaagtgggttgcagagattcgcttgccgaggaaccgaacccgactctggctcggaaccttcgacacagccgaggatgcagccctggcctatgaccgcgaggcgttcaagctacgaggggagaatgccaggctcaatttccccgagcttttcctcaacaaggacaaggctgaggaatccgctggtccaagctcgtcatcttcgtcacccccc

SEQ ID NO: 172 - DNA, 427 bp, Eucalyptus grandis
tgtccataccctctgtgggacttctggttcaatataaactcctcaacccagcttcctcctattcttcatgcatcatgatccaagatatgtcacagggttttaggaagattgatactgatcgatgggagtttgcaaaccgaggttttcaggaagggaagaagcacttgctgaagaacataaggaggagacgcaaactcagcgatcataggacaacatcgagtagtaccgttgcttcggattacccagaggctggaaaggaagctgaacttgaaatgcttaagagggaccaggaagcgttgaaggccgagatcctgaaactaagagaagagcgggagaactcgcagcatgagatcaaccaggtcatcgagcggtttcgctatgccgagtgcaggtgtcggcggatgttcctcttcctctccaaagcagc

SEQ ID NO: 173 - DNA, 607 bp, Eucalyptus grandis
gaaacaccttttgaataacatctaccgacgcaaaccaatccatagccattcggggcagggtgctcggttatctgattcggagaaacagatgtacgaggaggaaatcaagagactgcgacacgagaagagctcgcttcagttggagcttcaaagatatcagggagataatcaggatgttgatttccagatacagttactacgtaagcaattccaaaatatggaacaaaaacagacgcacttgatcaccgtcttagctcaattaatgcagaagccagtatttgcttctctttttacgcagcagtcggatagccctaccaaaaagagaaggttggcggaactggatcatttacatgactcagatgacaagagtgggctagagagtttgaaattccagaaagaaaaattcaatggtgttcccttttctctactagatttggactccgttgagaaactggagcagtctttgcactttttagaaaatctccttcaaggagtcgataacacttcaggcgcagaacagcacgacttcggagcaatatcgttgccttggccggcgggtttcaccgagagaaaggaatctttggatgattctgacaggcatatccac

SEQ ID NO: 174 - DNA, 719 bp, Eucalyptus grandis
atcggattgacttgcctttgaattcctcctcctccggggaaaattccacaccgaacttccgctttgggggggccgccggaaatctagggctccgctccgccgtcctcctccgtcgtccgcaggtccatctcggtttcaaatgctgttatatttttgatccaacatattgtcggagagcaatagaatctggcgttatgcagccaaaatctaaaatttcaaacggggtagatgctcatccacatagcatccagactagtgcagtattcactgaaccctggtggcgtggctataatactatttccccagctgacccaggaagaaacgaaacccatgcgcctttaggatgcataaatggtggttcagagtccaatggtggtcaatcacagtcaaatgaggaaagggttgaggaagatgatgatgacgataatgtcaaaggatcagggaaccctgcatgttcaggagcagttggaaatcaaggacaagggcctcaaaacgggcatggtgctcccactattattacaatgcgtgatgatggccttgcacaacctccccagctagagcttgttggtcacacaatcgcatgtgcatctaatccttatcaagatccatattatggggggttgatggcacaatatgggcatcagtcaatggcttatccttttgtcggtattcctcatgctaggatgcctctgccccttgacctggcacaagaaccttgt

SEQ ID NO: 175 - DNA, 570 bp, Eucalyptus grandis
actggggccaatgagaaggattctgtgatggaaattacatttcacgtgcccaactccaacacccaatttgttggtgatgaaaatcgtcctcctgctcaggttttccgtgacagaatcatgtcagtggcagatgttggggctggaggtgaagatgctgttgttacatttgagggaattgccattcttactccaaggggtcgctacagtgttgaacttcatctgtcattcttgcgacttcaaggacaggcaaatgactttaaaattcagtacagcagtgttgttcgcttatttttgctgccaaagtctaaccaaccacatacatttgttatcatcactcttgatccaccaattcgcaaagggcaaactttgtatccgcacattgtgatgcagtttgaaaccgactatgtggttcaaagcacattgtctatgaatgatgatttatttaacaccaagtacaaggacaagctggaaccatcttataagggactcattcatgaagtgttcaccaccatcttgcggggtttatccggtgccaaagtcacgaaaccaggaaaattccgtagttctcaa

SEQ ID NO: 176 - DNA, 754 bp, Eucalyptus grandis
cttgaaacaagtggtaatcgcctggcaagggcaatctctgatgccgatacttctagtgcagcagctctaatggatatgctggagcaaatggtgtcggttatgggcgacccaattcagcgtcttggtgcttacctcttggaagggcttagggcgaaattgaaattttccgggagcataatttaccgaaagctcaagtgcgaagaacctacgagctcagaattgctgactaacatgcaggttctctatcagatctgcccctactggaagtttgcatatgtgtccacaaatgtcatcatcaccaaagccatggaaaacgaacagagaattcacattgtcgatttccagattacacagggcagccagtgggtcactttcatccaggccctcgcacagaggcctggtggcccccccctcctccgcatcactggcatcgacgattctgattcagttcatgctcgtggggcgggactggagattgtagggcagaagctttcggaaatcgcagagtcatgtaacgtgccgttcgagttccatgatgcagccgtttctttatctgaggttgagctacagaatcttatgattcggcctggggacgctttggcagtgaactgtccttacatattgcatcacatacccgatgagagtgtgagcactcagaatcaccgagaccgggtgttgagactgatcaagagtttgtcgccgagagtggtgaccctcgtggagcaagaatccaacaccaacacatcctcattct

SEQ ID NO: 177 - DNA, 525 bp, Eucalyptus grandis
ggaaattgggatgaacctacgaaggaagaagttaatgaaccagctgatatagctgaagcaaagactgtcagtgattcagaggaagcaaaacctaatgctaagagaaaacagcctgagaaggaagcttctgagaaggaagcttcaaagaaggaaccaaacaaaccacccaatagttggtttgatttgaaggttaacacacatgtgtatgtaactgggttgcctgaggatgtcactatggaggaagtggtggaggttttttccaagtgtggaatattaaaggaggatcctgaaacaaaaaagcctcgtgtgaagatctatgttgacaaagaaactggaagaaaaaagggagatgcacttgtcacttatttaaaggagccctcagttgccctagctatccaaatattggatggagcaccttttcgccctggtggcaaggtaccgatgtcggttagccaagctaagtttgagcagaaaggtgataaatttatttctaaacaagtggacggcaagaagaaaagaaactga

SEQ ID NO: 178 - DNA, 978 bp, Eucalyptus grandis
ggccatgatgaaaacggtcatggactggaaaatggcttcacgccagtagttgagagcgatgctgaacacacttagccagaagatgttcaaaggcaaaccttcttctctcagaggctaaaagatgttccacccatggcttcttaatctgatccagatgaaccatggagaaacaaaatcgaagtctcatcaaaagggtatttgggaaggaggcattatacaaaatcattgcattggtttgctactgcagggacataaatgctgtggttatattatttagcatgcgccgtttctctgtaattacgagctgccttttgttcatgctagacttttgaacaactgcttttgcctttcctatatgaactacagatcctgattgacctaagtaatgacaaggcaaccgttcttacggacaaaatccaggtgctgaaggatttaactacggaagttaacaaattgaaagctgaatgtgcagctcttattgaagaatctcgtgaggagaagaatgagctcagagaagagaaatcatctttaaaatctgaggttgaaaatcttaatgtccagtaccagcaaaggacgagggttatgtacccttgggctgccatggatccatccgtcgtcatgggtccagcctactcatatccaggtccaatacccgtcactccaggtccaatacccatgctctcacaacttcagcctttccctttctttggaaatcagaatgcaagtgctattcctgctccgtgttctacctttatcccaaattcaatgcctgccaatcccacatttgaacagcagtcaacccaatatgcttccacttctcacgtgtcaaataaaaaagactccaaaagcaggtcttcagatcatcaaaggggcagcattgcagagcaagacgaagattcaaataacgtggcaacagaccttgaacttaagatgcctggaacatcatcacatcaggacttgacgtccggagaaaagaag

SEQ ID NO: 179 - DNA, 566 bp, Eucalyptus grandis
catcctatgaagccggaatctgttgaagtactgaatttcggagatagtgggagcggaaggttgctttcgagtcattcacaggtcgcagttgcagaggagcctctgaaccacgtcgaggcggagaggcagaggagggagaagcttaatcagaggttttacgccctcagggccgtggttccaaatgtatcaaagatggataaggcttcactgctccaagatgcggagtcttatatcagggagcttaacatgaacctacaagctgcagagtctgataaggaggatttgaagaagcagttggatgaactaaagaagcgatcatcggataaagaatgtatcccggtggatcaagatcgcaagatggcaaaacctacgggaagtaggtccactggggtggcaatcgatgtgaagataatgggttgggatgcagtggttcgagtagagagcggccggaaggatcatcctgcagcaaggttaatggtggctcttcaagaattgaacttggagttgcagcatgctagtgtttctgtggtgaacgagctcatgatccagcaagccacagttaagat

SEQ ID NO: 180 - DNA, 521 bp, Eucalyptus grandis
gcaacttttcgagctccgtcaggaggaaaaaaaaataataaaaaaaagagatgatgctcggagagcctcaccgtcctcctaatccgacgatcgacgttcctccctggccgatcctggacgatccgacggacgacgccgtgcctcactctccgtactccccttacacgctcaatgctggctacggcggcggctgcgactcctctccctccgccgccggccccggccacttccaggacgtcatggcggcgctccggcggttcctgccgtcgaaccgccccgacacggacccggacccggatatgacgtcctcccgcgaggcggacttccccatggacgtctactcctgcgacaacttccgcatgtacgagttcaaggtgaggcggtgcgcgcgggggcggtcgcacgactggacggagtgcccgtacgcccatcccggcgagaaggcccgccggcgggacccgcggaagtaccactactccggcaccgcgtgcccggagttccggaaggggagctgccggaag

SEQ ID NO: 181 - DNA, 449 bp, Eucalyptus grandis
ccgacgagccctccacctccgccaccaactccggcggcggggcggccgccgcgagctcgagcgggggcgggaggtcgcacgagtgctccatatgccacaagtccttccccaccggccaggccctgggcgggcacaagcgttgccactacgatggcggcgccagcggctccgccaacagcggggtcaccacgtccgagggcgtggggtccgcggccccgcccgcgctcggatacgacagcggccgccgcaacttcgacctgaacgtgcccgcgctgccggagttcccgaccgggttcatcgtgtcgggcgacgacgaggtggagagcccccacccctcgaagaagccgcgcttctcgacgcccctgaagatcaagctctctccagaacagtgaaatctttgcctgtgcttttaggattagcgcttgttaattgatttagctagggctttt

SEQ ID NO: 182 - DNA, 610 bp, Eucalyptus grandis
ctctctcttctttctctctcttctgcgtgcgcgatcgccattgaagaagctctgcgcgagacctcggaaggcggaggaggaatccccccacgcgatttcgcatccgccgccgccgccgccggccgccgctttccgttcttattgcaattctcaagatagatccatggcattcgagcagtactttgcccaggagtggaggcccatccctggaccagctatggattctggaagtagcgatggctgtttcgactgcaacatctgtctagactttgcgattgagcctgtggtcactctctgtggtcacctctactgctggccctgcatctacaaatggctccacgtgcaaagcgcctcgcttgcttctgatgagcacccacagtgtcccgtctgcaaggctgaaatatcccacacagccatggtccctctctatggccgtggccaaagctccaaagagtctgatctgcaagacaaggcactccaactaggaacaattgtacccccgagaccagcggcttgtggcatccaagctctcgcctctacaacaccccgcagcggtcagcagctcccctaccgtaatccttaccaaaatccgtactacagcgccaattcg

SEQ ID NO: 183 - DNA, 767 bp, Eucalyptus grandis
cccgactcagcaagcaaaagaagaaaccagaaaaatcagacaccccgatttcacattctctactacagacttccagagatggtgaagagagacagagaggacacggaggtcgaagccctggccagggccaattgcttgatgctcctctcccgagttggcgagagcaccgactcggcgtcgccggaccgcaaatcgcggcctaccgagcgaatgttcgcgtgcaagacttgcaaccgcgagttctcctcgttccaggcgctcggagggcacaaagccagccacaagaagccgaagctgatctccggcgacctcttccacctcggccacgcagcagattcctcgccggccaagccgaagacgcacgagtgctcgatatgcggcctcgatttcccgatgggccaagccctcggcggtcacatgaggaggcacagggcggccatgctggaaagcttggcagcagcagccgcaaagcctgtgccagtgttgaagaaatcaaacagcaagagagtcacgggcttggatttgaactcgttgccgatggaggacgacttgaccttgcgcttaggaaaggttgcgccgccattggtgctagatctcgttttgtaggagcttagagagcgtagattgtgtacaaagcagtttttagtcggtgcctggccatttctttttctttttttttccttcttttttgaattcattgattgatattttgaatcagagactgggtttcgcatggatattaatttgtttccaaaaaaaaaaaaaaa

SEQ ID NO: 184 - DNA, 469 bp, Eucalyptus grandis
catgacccgacgccgccggcgaacgactgggtcatggagaccaggaagaaccactcggtgtcggcggcgtcgggttgcccggtcgggcctacttcagctcgaatcccgcgtgggtcacgggggccgagaggttggggaattgcgggtgcgatagggcccggcaggcgcagatcttcgggttgcagaccatcgcgtgcgtccctgttttgaacggtgtggtcgaactgggttccaccgagccgatctaccagagctccgatctgattagcggaattagggggctgttcaatttccatgaatcggagatgggatgcggtggtagggttttgaatagcgagcatgacccggcgtcgctttggatctgcgatccgccagtcacgatggagattaacgatcgtcctatgacatttcagatagagaaccccagctcgagcagtcttaccgaaagccccagcgcgatctgcgcgat

SEQ ID NO: 185 - DNA, 533 bp, Eucalyptus grandis
gccttggcacgcaaattccatcgggaatccatatgccttctgcgaatcttagttccatatcgatcttgggtcctattcccatggtatcgggggatggtggtgggaggaccggttctgagcggtcaagaaacgctgattgtgctccggcaggttttcctggaggtgatgaagatgtgaataagggaggggacattccttatggaatgtcaaccatcgtgagagtcattcccaattctaggtacttgagggtggcgcagcaactgcttgatgaaatagtgaatgtgcgaaaggctttgaagcgccctgatgacgcgaatgaccaatctagacatgagaaccaaaggagccccaaagatgcggatgggggttccaagaacgaagcatcctcaaatccccaagaatccgccagtaactctagcgagctttctgctgctgaaaaacaagatttgcagaacaagctcacgaagctcttgtccatgttggacgaggttgataaaaggtacaagcagtactatcaccaaatgcagatcgtg

SEQ ID NO: 186 - DNA, 413 bp, Eucalyptus grandis
ggacggctcaagaagacaggatcctcaccaactacatcaaggctcacggcgagggcaggtggaggaacctccccaagaaagcaggtccctagcgtttgccagtgtgtttttccttttgttttctgcctttgaatgagcttgtggagatagcgggagagatcgagactcgtccgggcggttcgattctcgagagataatcgtcgtcgttcgctagggaaacgaggtttcgtctgactacggatggaaattcctttttgcagggttgcagagatgtggcaagagttgcaggctgcgatggttgaactacctgaggcctgacatcaaaagaggcaacatatctcccgatgaggaagagctcatcatcaggcttcacaagcttttggggaacaggtgaaacttcttctgttctgacc

SEQ ID NO: 187 - DNA, 574 bp, Eucalyptus grandis
tcgaactttatcgcgatctcgccgccatctcgtgccagcctgcaccagatgcatcacccgccgaacccggattctctctcgctgcttcaatccgcgcgaaccccaaatgcacctccggagcatcccgttccctccacttccaggagggatgaagttgctgtgttgaaaagtcagaaggcaggccgtgagaaattgaggagggatcgactgaacgagcactttatcgagttgggaaatacgctagatcctgataggccaaaaaatgacaaagcgacaattttatcagatactgtacaactgctgaaggatttaactgctcaggtgaaccaactcaaagctgaatatagtacgttctgtgaagaatctcgtgagttgacacaggagaaaaatgatctcaaagaagaaaaggcctctctaaaatctgacatcgagagccttaatgctcagtatcagcagagagctagagccatgtttccatggcccattatggatcactcagtggttatggccccaccttcatacccatatccagtgcccgtagctgtgccttctggtcccattcctgttcatccac

SEQ ID NO: 188 - DNA, 988 bp, Eucalyptus grandis
gggcgccgtctggctagcgagggcgagctctcttatcttcttcttcctcctgctccacctaaaaccctcgcccggcaaaaccgattcgaggtcgagagtcgagtaaagatgaatgtggagaagcttatgaagatggcgggttcagtccgcactggtggaaagggtaccatgagaagaaagaagaaggctgtgcacaagacaactaccacggatgacaaaaggctccaaagcactctcaaaagaattggggttaatgctattcctgcaattgaggaagtcaacattttcaaggatgatgttgtcatccaatttgtaaatcccaaagttcaagcctctattgcagccaatacatgggttgtcagtggtgctcctcagaccaagaaattgcaagatatcctcccaggaataatcaaccaattagggccagataacttggacaacctaaggaagctggctgaacagttccagaagcagtcacctggtgctgctgccacagcaggcgcaactgcaatgcaggaggatgatgatgatgaggtccctgaacttgttccgggggagactttcgaggctgctgcggaggagggtcacaaatcttagagactctacatggattttgtgcctttccatatatatttcgtggtgtttaaaattttgccttcttctcttcgcccttcttactttcacattttgatgaagtgttctgtgattgtcatctcatgatcctgtgacacactaattagctaagttactggaaactctagttcaaagctactctcttttatctttaaaaaaaaaaaaaaaaaactcggcaacttcgatcctccttagttttcgacttcaattcgcctttaccgtaaatctgagaatgtcttgctgcggaggaagctgtggctgcggctctggctgcaagtgcggcagcggctgcggagggtgcaagatgcatgccgacctgacctacaacgccgagagcatcaccgccgctgagacc

SEQ ID NO: 189 - DNA, 536 bp, Eucalyptus grandis
ctccatttcaaattacagacgagaggctctctcaccttctccgtcgctctgaaaccccacgccctacagaccttctactacaatgggggaacccatctttctccccggccggacgagtctcgtcggctcgatcagtgtcaacgtagttggaatccaacacaatgccggcaccttcagagcgggcgagacagtggcacttgtccgcgagccgtccaacactgatgatgagatggccatccaagtcctcaacacgaggggcatggtggtcggctacatcaagcgcgaagctgccaaagtcttggccccactaatagactctcagctgatctccgtctacgccattgtgcccaaagttcctagggtcgagaagctgtttttcatcaattgccaagtgcgagtattagcgagggatgatgacttcgagcacgtgaagtcaacgatcttggaaggcaagttgatgctcaccccgccggtggggaaggaggtgagaggcgtgaacgagagtttcacgttggtcggccagggtgtcgagaaga

SEQ ID NO: 190 - DNA, 2444 bp, Eucalyptus grandis
ctctcctctttcctctctctcctttctctctctctctctctctcgaggataaacagaggacgcgaaaaggaattgactcggggggtgggagtcgcgccaggagcttcttccctgcgctgagatctgatgctctgatttctccagtgtaacgggaacccagcaaatccagcaacctcgtgcgtcggagtcggtgttcaccgcttgttttcggattccgatcttataagtttgtgagggttttgtggttttttcgtggaagatctatatcagaaaatgatgatgttcgaggatatgggaatctgtggcgatctggacttcttctctgcccctctcggggagggacatggggttgctccgcaaactgagccagaggccaccgtggaggatgattattccgatgaagagatcgatgtggatgagctcgagagaaggatgtggagggacaagatgcgtctcaagcggctaaaggagcagaacaaggggaaggagggagttgatatcgcgaaacagcggcagtcccaagagcaggcaaggaggaagaagatgtcgagagctcaggatggaattcttaagtacatgttgaagatgatggaggtctgtaaggctcagggttttgtgtatggaatcatcccagaaaagggaaagccggttaccggggcatcagacaatctaagagaatggtggaaggacaaagtcaggttcgatcgaaacggtccagccgccatagccaagtaccaagccgatcattccgttcctgggaagaatgatggatgcaaccccatcggacctaccccgcacactctgcaagagcttcaggacacgacccttggctcgcttctgtcagcactcatgcagcactgtgacccccctcagaggcggttcccattggagaaaggcgttcctcctccatggtggcccactggaaacgaggactggtggccccagctgggtttgccgaaggatcaaggagccccgccctacaagaaacctcatgatcttaagaaggcatggaaggtaggtgttctcacggcggtgatcaagcacatgtctcctgatatcgccaagatacgcaagctcgtgaggcagtccaaatgcttgcaagataagatgacggccaaggaaagtgctacttggctggctataataaaccaagaggagtctttggcacgagagctttaccctgattcatgcctcccactgtcctcatctggagggagcgggtctttggtcataaatgactgcagtgagtatgatgtcgaagggatggaagacgagcccaactatgatgtacaagagcgcaagcctgagaatctcaacccaccatcccatctggggctggagagaatgagaggtccttttgtccagcaatcgcctttccaaatgaagggagaagttgtcagcaacttagatatggcgcggaagaggaagccgtgcaatgatttgaatatggtgatggatcacaagattttcacctgtgagttcctgcagtgcccttatagtgaactgaggctggggttccgtgacagaacctcaagggacaatcaccagctgagctgcccttacagaagcaattcttcagagtttggcgggtcaaacttccatgttaatgaggtcaagccagtgattttccctcaaggttttgtccagtccaagcccatgacttcaacggtcaattcagcatcaaccccctttgatctatcagggcttggagttcctgaagatgggcagaaagtgatatctgatcttatgtcgatctacgataccagcatccaaggcaacaagaacatgaatcccgcgaatgatgcgatcatagaagaccagagccgtcctcagccaaagcttcaacaacaaaacgagtttgtgggatcattctttcagcaacccaatgcttccgccaatcatcacatgttctcccgagaggacattcagttcgaccggttcaagaccatgaattcttcgttcgaggccaacaaccacaaccacgacaacctacagctcatgttcgggtctccattcgatttgtcgtctttcgattttaaggaggagttgccaggtggggtcatggatcccctgccgaagcaggatgtcactatatggttccagcaatgatttctgcgtgctcagcttctcgggcgttcttgggaactgtatatttctctgaagagagatctatatacttaactgtggtctcttgttagatcgagtttaagttttcttggccaaggtctttgcttagcttatgtattctctcgaactttgttaggtgtagatttagaaagtttaggcaggggtttagatggggaaataagatattagacaaggacccatgactagccctgcttgctgctgaatatataaaaatgttgtctgatcaagtgattattctactagactgtcctataaataagtgaggtgcgttttcttttaaaaaaaaaaaaaaaaaa

SEQ ID NO: 191 - DNA, 473 bp, Eucalyptus grandis
cagcaagcaaaagaggaaaccagaaaaaagcagacacctcggtttcacgttctctactacagaattccggagatggtgaagagagacagagaggacacggaggtcgaagccctggccctggccaactgcttgatgctcctctcccgagtcggcaagagcaccgactcgccatggctgaaccacaaatcccggcctacggagcggatgttcgcgtgcaagacgtgcaaccgcgagttttcatccttccaggcactcggagggcacagagccagccacaagaagccgaagctgtccggcgatctcttccacctagggcgctccgcggattcctcaccggccaagccgaagacgcacgagtgcgcgatatgcggcctcgagttcccgcttggccaagcccttggcggtcacatgaggaggcacagggccgccatggcggagagcttggcgacggccgaaaagcctgtgccggtgtt

SEQ ID NO: 192 - DNA, 468 bp, Eucalyptus grandis
caaaaaagttacggttggattgcggtaaagaaatggtgatggatatttcaaatgacgaccgctatcttaatgaagagattggtggtccgaaggatgcacttgatgatggaactcagcctaataacaagaggaagcgcggtagagcaccaaagagggctatgaaggctgaaagggaaaagttaaagcgtgatcatctgaatgagcttttcgacaaactgggtagtcttcttgaattgagtgagccgaacaacgggaaggcctctataataaatgagactatccggcttttaaaggatatgatttctcagattcaaagtctaagaaaggagaacacgactttgttgtccgaatctcattatgttgcagcagaaactaatgagctgaaagacgagaattttgcactcgaagctcaaatcaagaatgtacaaagggaattagaagacaagttaggccattctaagcccgacc

SEQ ID NO: 193 - DNA, 968 bp, Eucalyptus grandis
gagtgtctgccacttctagatatgacccagcagcctccttggcaggaattggttgcaactgatctacatggcaatgaatggcatttccgacatatttttcgagggcaacctagacgccacctactcactactggatggagtgtctttgtgagctccaagaagttgatagctggtgatgcctttatatttttgaggggtgaagatggagaattgcgcgtcggtgttaggagattaatgagacagcaaagtaacatgccatcctctgttatatctagtcacagcatgcatcttggggttctggccactgcatctcatgccattgcaactggaactctcttttctgtattctacaaaccaagaacaagtaggtcagagttcattgtgagtctcaataaataccttgaagcacgggcccacaagctatccattggaatgaggtttaaaatgaaatttgagggtgaagaagtttcagaaagaaggttcagcggcacaatcattggtgtaggagacagcatgtcatctggatggactaattctgaatggagatccttaaaggtccaatgggacgaaccttcatcaatcatgcgtcccgacagagtttcatcatgggaattggagccacttgttgtgactgctccttctaattcccaacaggtacagaggaagcgagcacggccaactgttttaccatcatcatcagtgcaagaactttctgcgttcggtggacctaaagctcctgagtattcttcagattttctacatggcgattcccagaggggaagagatgtctatctctctcccaagttttctccatctgctaggtcaaaatctttaaattacaatggaaatggttcaccagctgcattatctggctacacagtcaactggcctagtcatatggaaactattactgatccatgtacaccagtcaatgggaaagaatctagtgaaaagagagagagcggtgg

SEQ ID NO: 194 - DNA, 345 bp, Eucalyptus grandis
cggccgcctgcagctttcccctccgtgtcgacacgacgacgactccgccgccgctcccccctcgcgtcgtctctccttctctcgccctgtatatatctctcgtcccccgacaaaaaaaggagaaatctgaagagaggggactgaaattaggttattgagaaggattcttcccgtgaccaatcttttggagaaagatggcttctcaatttaatttcaaaggcataaccgatgcatcgcaagctgaaggagtagctgggaaatcacacggaaatcactctttaactcggcagccatcaatatatgctttgacttttgatgagtttcaaaacacatggggtgggcttg

SEQ ID NO: 195 - DNA, 456 bp, Eucalyptus grandis
gagacttcccctagctcatcttcactcaccaccaccaccgcccccgcccccgccgccgccgccgccgccgcaaccacctcatcctcctcctattcctccgccgtggcggtcgccgcgacaacagcaacaacctcctcctcctccacctcctcgaccgggtcggatccggcgctagaaccgagcaaaagaagcgaggattgcacttctcaaaagggcccggggaagtccccgagcccgggcgcccacccggaggagccggccggcaagaggcacaaggccgggggctccggcgagcacccgacgtaccgtggggtccgaatgcggaactggggcaagtgggtgtccgagatccgggagccgaggaagaagtcgagaatctggctcgggacgtaccccacggcggagatggccgcccgggcccacgacgtggcggcattggccataaagggcagcttc

SEQ ID NO: 196 - DNA, 569 bp, Eucalyptus grandis
aaaagcagaaaaagaaaaaagagagcaaaaaaaaggcaatcgagagcagcttctccatttcctttcttctcttccgctcgatccatttcgaaatccgcagagaattgtcgagaagagacgagacgatgttcccgagacccaaagtcgacccggcctccgccggaaccgtcgtgatccgcgaggtgtgggcccacaacctcgagtccgagttcgacctcatccgcgacgtcgtcgacacccaccccttcatctccatggacaccgagttcccgggcgtcgtcttccggccccctcctcccccctccgccggcgggcactaccgccgcctccgcccctccgaccactaccgcctcctcaagtccaacgtcgacgccctcagcctcatccaggtcggcctcaccttctccgaccccgacgggaacctccccgacctcggctgccccggcggcccccgctacatctgggagttcaacttccgggacttcgacgtcgcccgcgacgcccacgccccggactccatcgagctcctccgccgccaggggatcgacttcgagcggaaccgggcggag

SEQ ID NO: 197 - DNA, 1007 bp, Eucalyptus grandis
ggaaaccatctgaaaggcgtggtgggcctcggggtcctttccgtggaagtggaggtcgccgtggcggttttaacaatggagaagctggcgagggggagcgtccaagaagaacatttgaacgccgcagtggcactggacgaggaaacgagtttaaacgagatggagctggtcgtggaaactggggaactcctactgatgaaattgctccggagcctgaagaacctgttgtggaagttgaaaaaaatgtgggatctgagaagcagttggttgatgaggaggctgcagatgctagcaaagagaatcctttgaatgaaccagaggaaaaagagcctgaagataaggagatgacattagaagagtatgaaaaggtccgcgaagagaagaggaaggcattgcttgcattgaaggctgaggaaaggaaagtggaggtggacaaagagttgaagtccatgcaacaactctctagcaagaaggaaaaccatgacatctttatcaagctgggatccgagaaggacaaacgcaaagaggctgctgagaaagaagagagagccgagaagtctgtcagcataaatgagtttctaaagcctgctgaaggggagagatactacaacccaggtggccgtgggcgaggccgtggccgcggtgccagaggtggttatggtggtggaggtggtggtggctatggtagagatgcagctgctccttcgattaaggatcctggccagttcccctcccttggtgggaaatgaggttttaccactgcatacttcaagctgagttacttcatgcttggagttgttgtgatcttccaggataatcagttattaacgggaattacatttttcctgtaacagaaacctttgatattattcagtcttttttgagtgtaaattttagtttctccatggatttactttgcttttcttttgactcacttcagttttgattgtgttagaagagaatgaattaagccttttctaaaaaaaaaaaaaaaaaaaaaaaaaaaa

SEQ ID NO: 198 - DNA, 390 bp, Eucalyptus grandis
cccatttcttccttggctccgttctgttgcttcctctctctgtcttcgacacttcagctcgtgcgagcccaaaaatcgatccttttctgcttccttttgcctctgttccagctgtggtcgagtaagcaggagtcaattgatactgggtcgatctggtcggcaacttttgttggaagtttgaggaatctgattgagagaagaggtagatctaaaggatcaaaaggatgtcatttaccggcacccaagttaaatgcaaggcttgcgaaaagacagtttatcctgttgaacagttatctgcggatggggttgcataccacaagtcttgcttcaagtgcagccactgcaaaggcacattaaaggtgtgccaattttttcaattggtttacaatc

SEQ ID NO: 199 - DNA, 586 bp, Eucalyptus grandis
tgctttcctcctactctgtcactctcactctcactctcactcctcctcttggctctccctcaccatcttcccaggtcccgcgccgcggtatcgctgccccgaccattctcgccgtctgctcaataataatcggagcaaagatgattgatctcaacacggtggaggacgacgaaacgccgtcgtccggctcctcccctgcctcttctctgtcctctgccataagcgcttcgaatattaactccaaccctgcgtacccaacttcgtcttcttcttcttcgtcctcgtgctctcccttgtgcttggagctgtggcacgcctgtgccgggcctctgatttcgcttcccaagaggggctctctggtggtctacttccctcagggccacttggagcacgtctctgattttcccacttccgtgtttgatctcccttcccaaattttctgtcgtgttgttgatgtgaagctccatgccgatgcgagcaccgacgacgtttatgcgcaggtttccctggttcctgaaagagagcaaattgagcataaattgcgcgaaggggacaacgaaatagacttggatgaggatgaaattga

SEQ ID NO: 200 - DNA, 619 bp, Eucalyptus grandis
cagaagcgaccattaacgctgtctctctctctttctctctcctcctcctcctcctcctcctcctcctcgctttttcttgaaacaatcgataatccttccttccatctttcctcctcctcccccccttgaaatcccgaatccaccaccacaaccccccaccgccacctgctcgttgggtaatctctcttttgcttctggagagggaagtgaagtgatctcggatcagctgactttggagaatgatcctaaagctggtatttctacattgagatcatctttaagagcgctgtggttctctgatggcatctcatccatcaaatcattcgtgtgggcgccctcatcaaggtgcgtttgctgatgctttatacaaagagctgtggcatgcctgtgctgggcctcttgtcacccttcctcgagagggagagcgtgtctattattttccacaaggtcacatggagcagcttgaagcatcaacaaacagagggttggaacagcaaatgccttctttcgatctgccctctaaaattctttgcagggtagtcaatattcagctccgggccgaacctgaaacagatgaagtttattcacagataactttgctacctgaacctgaacaaaa

SEQ ID NO: 201 - DNA, 376 bp, Eucalyptus grandis
tttaatggccttgacgcaggggaggggagattttctgaacttggggagatggtagaatagctgccgaggtgtcaactcatgtcagaattctgactgatctggggatcttgctctcaaagaggatttctaagagcagtatctcaacttggcatacgttcagcaactggaaaatagtaggttcaggcttatgcaactggaacaggagcttcaacgagcacgccagcagggtatatttgttagttctggaaatcctggggatctcagtcataacatggctgccattggcaatggggccatggcctttgacaccgactatgcccggtggctcgatgagcatcaacggctgatcaatgacctaagatccggagtgaacttc

SEQ ID NO: 202 - DNA, 743 bp, Eucalyptus grandis
ttttttttttgtatataatctctttatttctagttagggaaaattcagaaagaagccgtgaaggaacttcatccaatggcgatggaaaatctgaagtgcaaggaaaggttgctggggaggtggatgctgcttctgagaatgtgtccggtggagccatcgaacgtcccagagccacaggaaaattggctgcgcctgtaaactcgcccagcatgtcctcatcattggacctgaagaattcttgcatggatgcaaatgccaaccctgtgagcattttgcaacctggtgtagtgccacctgaagcctggttacagaatgaaagagaactgaaaagggagaggaggaaacagtcgaaccgtgaatctgctagaagatcaagactgaggaagcaggctgagactgaagaacttgccaaaaaggtggattctctgagtgccgagaatagggctcttaaatctgaaattagtcaactaaccgagaactcggataaattgaggctagaaaatgccacattgatggaaagactggaaaatgcacagggagtggaaaaggcggttgaatcactgggtaaattcaacgacaatgggcttctctcggacaaaacagagaacttactttcaagggtaaacaactctggtgccgttgatcgaagaagtgaagatgagggagaaatttatgaaaggaagtcgaattccggtgccaagcttcaccaacttttggattcaaaacccagaaccgatgcggtg

SEQ ID NO: 203 - DNA, 435 bp, Eucalyptus grandis
ttttctctctcgccccaccacctgaagatggaggtcgctccacaggcggagcatcaccagaaccaccaccaccaccaccaccagtatcaccaccagccgcagcaaggggaaccgggaagctactttctctcggctcctcctccgccaccacactatagcagctctggcctgtgttatggtggtggcgttggagacaacaacaatggtgggtaccttcactctcctctttctgtcatgccgctcaagtccgatgggtctctctgcatcatggaagcactcacaagatccagaccccaaggattaggtcaaggttcaacgccgaagctggaggactttttgggtggtgcaagtgcaacagtgacagcaacgacaatgcctctcagcttggacagcttgtatagctaccaacagagtgccgacccagagaaacagtcg

SEQ ID NO: 204 - DNA, 662 bp, Eucalyptus grandis
gcgaaacgcagagagagaaagtagagagagagagagagacaagtattccctctcagtcaccccagccgacgatcctcccgccgaccgcctcctcccccggccgttccgatcctcccggcgacgcgacgacaatggtgaagccgagcggcggcggcggcgatcgggcccccccgctggcgccgttcctcagcaagtgctacgagatggtggaggacgaggcgaccgaccccatcatcgcgtgggggagcgccggcgacaccttcgtcatctgggacatcactcaattcaccctccagttgctcccccactacttcaagcactccaacttctccagcttcatgcgccagctcaacatctacggtttcagaaaagttgattcagatcgttgggaattcgcaaatgatggattcatcagaggtcaaaagcatatgttgaagaatatacgcaggaggaagaatgttcaggttgtggatcagaaaaaatcattgcagaagcaggataattccgttgaagaagtcgataaaattaaaatagatgggctttggaaagaagttgaaaatttgaagattgataagacagtcctttcgctggagttaggtaaagttagacagctccaggaaacttcagataataaattggtcctcctgagagaccgtgttcag

SEQ ID NO: 205 - DNA, 694 bp, Eucalyptus grandis
aaagtcccgagatgccgcgacgcgaattcccctctcgaatgcgctcggaattcgagcgatgatcggagcggcgaccaaccagatcccgccgccgccgccgccgccgcagccgcagcaagccgcgcccgccgccgccgcgatccggttccccgactccgtctacaacgcgctcagggtgggcgccgtcttccagcggctgtcgaagcacctcgccaccatcggcaagggctccggcctgtcggcatcttgcggtacttccatggagttcctgaactcgtgcctctgcctcgccagaggcattgactatgcggtcgcgaacaatgaggttctgcccaaagctcacgaattgcctgtcttattgaaaaggctctgccttcttaaagatgatagtttctatctttcagttataatggttctgatgatctctgttaagaatgcatgcaaatataaatggttttcagagaaggattgccaagagctccttgcccttgttgatgaaattgggaaaaactttcaaagtccaagagacgctgccgttggaagtactgcctctttttcccgagtttcaagtatatttgcaagattctatccacagctgaagatgggctacgatcttatttcgctggaagtagagcctggatatgcagcactggtcaatgattttcacatatctaagagcatggtgcactctcca

SEQ ID NO: 206 - DNA, 1210 bp, Eucalyptus grandis
ggaggaggaggtgaggaggaaatgaagggaaaagagggggagagaaaaggaattcaggcacggcaacaactggaaaggaacggggttcaaaggttctctctcttttaagcagtgagtgagggggtgcaaattctcattccaaccatgattctgtcttgagctcgtggggggtgagggagagggagacgtctccagctcgagtcgtcatctgggtccgcgtcttctcttcccttcttccaatggtttgatcctaggacagagagagaaagagagagatatacaaaaagagagatacagagagatagagggagagggagagggagagggagactcgtggcgctgtttcgagctttctagcttccggaggaggagggctggtgttgagcgaaacttggagaggtcatgaattcgacaaccactcagtttgtgtcctctagaaggatggggatgtatgacccgattcaccaaattggaatgtgggacgagaacttcaagcagaatggaaatcctaatgcgccgccagctctgatcatacctatgcacgcgaatttggacaaccagtcggaggatacttctcatggatcacaggatactgctggcaagtatgagcaagaaacatcgaaaccttatgataaggtgcaaagacgtcttgcccaaaaccgtgaggctgcgcgcaaaagccgtctgcggaaaaaggcttatgttcagcagctagaagcaagtcgtttgaagcttatgcagttagaacaagaggttgaccgagctagacaacagggtgtgtacatggcttcaggagtagattcagcttatccaggatatggtggatgtttaaattcaggaatcgttgcatttgagatggagtacgggcactggattgatgaacagaatagacaaatatgtgagctgagggctgctttgaatgatcatagaactgacgtagagcttcgcatcctcgtggaaagtggcatgaaccactatttggaactttttcgcatgaaagcggttgcctcaaaggccgatgttttctatgtgatgtccggaatgtggaggacatcgtcagagcgattcttcctgtggatcgggggatttcgtccttcagaacttcttaaggttctcatgcctcagctcgaccccttgtcagaccaacaatgggcgtttgtttccaacctcaggcaagcttgtcaacaggctgaagatgccctaaagcaag

SEQ ID NO: 207 - DNA, 438 bp, Eucalyptus grandis
aatcaacaccactccccaatttctctctctaagatcccaccccaaccgccaccctcaatctctctctttctctctcttcttcagtgtctgccccgtctgcgacaagggcttcccctcctaccaggccctgggcggccacaaggccagccaccgcaagcacgcctcctccgccgcggccgccgccgggggtgacgaccagccgaccacctcgagcacctccgcggcgacgacctcctccggcgtctccgggaaggtccacgagtgctcgatctgccacaagagcttccccaccggccaggcgctcggcgggcacaagcggtgccactacgaggcccccgcccccatccccgcctccttctccgccccctccgccgccgccgccccggccgccagcggggtgagcgtgtcggagggcgtggggtccacgcacacgcagag

SEQ ID NO: 208 - DNA, 516 bp, Eucalyptus grandis
agacatcacaaaattcagcagctacaacgagctcggagtgagcttgctcgcatgtttagccttgaaggccagttggaggaccctgtgagatcaggctggcagcttgtattcgtagatagggagaatgatagtcttctccttggtgatggcccttggccggagtttgtgaacagtgtgtggtgcatcaagatactctcacctcaagaagtccagcaaatgggcaaacaagatctggagcttctgaattccatccctgttcaaaggcactcgaacggcggttgcgatgaattcacaaaccgacaggattctagaaccattaactccggaataccatctgtggggtctcttgattatggaactctatgacctgttaagatgcaatttcttgctgtaatattcagtgttgtccaagccatccgtggttggaacgactcgcttagttcttaccttagattgtaacactcatgcagaatttagcactgtaatgatatttgcttctctcccaaaaaaaaaaaa

SEQ ID NO: 209 - DNA, 547 bp, Eucalyptus grandis
aaccgacgacacaggtgacaagaatcacaggttcgaagggggtcaattgggtgttgcagcagcttctgattccagtgacagatcaaaagaaaaagccacagatcagaagactttacgcaggcttgctcaaaaccgtgaagctgccagaaagagtagattaaggaaaaaggcatatgtccaacaactggagagtagcaggctgaaactcacccaactagagcaagaactgcagcgagcccgtcagcagggcattttcatttcaggtagtggagaacaatcccactcaatgagcggaaatggtgccctggcctttgatgttgaatatgcacgttggcttgaagagcacaacaaggttgttaatgagctgagaaatgcggtcaatgctcatgctggggacactgagctacggacaattgttgacaatgtcgccgcacactttgatgaaatcttcaagctgaaaggcactgcagcaaaagctgatgttttccacattttgtctggaatgtggaaaactccagcagagcgatgctttatgtggattggtggg

SEQ ID NO: 210 - DNA, 522 bp, Eucalyptus grandis
aaaagagcgaccattctctctctctctctctctctctgtgaagatcctctctagcgataaatcactgttgcccatttcttccttggctccgttctgttgcttcctctctctgtcttcgacacttcagctcgtgcgagcccaaaaatcgatccttttctgcttccttttgcctctgttccagtacagctgtggtcgagtaagcaggagtcaattgatactgggtcgatctggtcggcaacttttgttggaagtttgaggaatctgattgagagaagaggtagatctaaaggatcaaaaggatgtcatttaccggcacccaagttaaatgcaaggcttgcgaaaagacagtttatcctgttgaacagttatctgcggatggggttgcataccacaagtcttgcttcaagtgcagccactgcaaaggcacattaaagctgagcagctactcctcaatggaaggagttctatactgcaagcctcactttgagcagcttttcaaggagactggtaatttcaacaaga

SEQ ID NO: 211 - DNA, 1160 bp, Eucalyptus grandis
ggattctgaaggcagagctcttgaggagctgggggtagatgagaatgatatcggaggatctcctccaagatcaactcctcacatgttctgtaagacactcacagcttctgatactagcaccccggagggttttctgtcccacgtcgagcagctgaagattgctttccccctctggactataagcagcaaaggccttctcaggaacttgtcgccaaggatttgcatggagtcgaatggaggtttcgccatatttatagaggtcagccaagaaggcatctgcttaccacaggatggagtgtttttgtgagccaaaagcgtttttcatgtattctacagtccaagggcaagccatgcagagtttgtcgttccctatcagaagtatctcaaaagcatcaacaacgtgatatgcattgggacaaggttcaaaatgagagttgacgtagatgatgcaccagaaaagaggtgtactggtgtagtgactaggataggcgacttggatccttataggtggcccaactcaaaatggagatgcctgatggttcaatgggatgatgatatcacgaatgggcatcaagatcgggtctcaccctgggaaattgatccatctgtttctcactcacctttgagcattcagtcctctccaaggcttaaaaggccgcggactagtctgccaacaatgccgcctgtccctggtggaggggtcaggcttttggactttgaggaatctttacgatcctctaaggtcttgcaaggtcaagaaaagttgcatttggtgtcacctgtctatggacgtgacaccctaaactgtcaggtcgatttcgaacaatcccctgcacatcagggtctagcatctgttgtaagtaagaaaaggccaacaatatcaatgagtacatgagggctaatgcccctagttatgcaggctttgtggaatccgatagattcccaagggtcttgcaaggtcaagaaatatgcacactgaagtctttgacgactaaacctgagtacaacctagggacctgggggaaatccagtctttcgtgcagttctttcggtgtgcatcaggcacccaagtaccatttcgaccaagtgaaatcatccgaaagccttcagaaagtgtactttccatataatgacattcttaaatccagccaagatcgcac

SEQ ID NO: 212 - DNA, 850 bp, Eucalyptus grandis
ttcgacgggcaaatcgtccccagactgttatgccttcttcagttctatcaagtgacagcatgcatattggccttcttgcagcagcagctcatgctgctgccacgaacagccgctttacaatcttttacaatccaagggccagtccatcggagtttgtcatacctctggcaaaatatgtgaaagcagtctatcacacaagggtatctgttggcatgcgattcagaatgctttttgagacagaagagtcaagcgttcgtagatacatggggacgataacaggcattagtgatctggatcctgttcgctggcaaaactcacattggcgttcagtaaaggttggatgggatgagtcaactgcaggtgagaggcagccaagagtatccttgtgggaaattgagccactaacaacattcccaatgtatccttctccattccccctcagactgaagagaccatggccatctggacttccttcatttcatgcccttagggatggtgatatgagtatcagttcttcactgatgtggcttcaaggtgttggggatcagggagttcagtcgttaaacttccagggatttgggatgactccatggctccagccaagatatgacacttcaatggctgctttacaaactgatgtgtatcaggcaatggcaagcgcagcactgcaggatatgagggcagtggacccttcaaaatgtgcatctcagtctcttctgcctcttcagcaatctcaaaatgttcctatggggcaagcttctatcatccagaggcagatgttgcagcagtctcaatctcaaaatagccttcttcagggcttccaggaaaatcaggcaaaacccaaaggcag

SEQ ID NO: 213 - DNA, 534 bp, Eucalyptus grandis
ggacaagctgagggagatagaaaattcattgtttggacctgaatctgatatcagtgatagctgcaattgttgcctaaatagtgggagccaccaattcccgtcaactgggcagtggaatgtaaaccagatgatagagatgatccctaaattggatttgaaggacatgctgattgtctgtgcacaagcagttgccgaagctgacatgcctaggacagctgctttgatggaggtgttagagaggatggtgtctgtctcaggagatccaatccaacggttgggtgcttacttattagaagggcttagagcgaggttggaatcatctgggagcataatctacagaaagctcaagtgcaaagagcccactggctcggaattgatgtcttacatgtccatcctctatcaaatttgtccatactggaagtttgcctacgagtcggcaaatgttgtaattggggaagctataaagtacgagtcaagaatccacataattgacttccagatcgctcaaggaagccagtggatccctattatcca

SEQ ID NO: 214 - DNA, 358 bp, Eucalyptus grandis
ctcctctcctccctcactctccctcttatctcctccctcctctcctccgggtacatgcaagaattcgagggggagagagggagagagcgtgctttgaacatggggaggagcccgaggtgcgacaaggacgggctcaacaaaggagcgtggacggccgcggaggaccagatcctgatggactacgtcaagctccacggcgagggcaaatggagccggctctccagggaaaccggtctaagaagatgcggcaagagctgcaggctgcgttggatgaattacctgaggcccgacatcaagagagggaacatctcgcccgacgaagaagaactaatcatccggcttcacaagctattgggca

SEQ ID NO: 215 - DNA, 988 bp, Eucalyptus grandis
actcccctcgccccccctacatcatccctcctcgctccttccgtcctttctctctcctctgcttcttcttcttcttcttcttctccttcttcttctttctctctctagctctctcgctctggcccacgcggctgctcctccttcctgctctctcccccccatcgcggccgagcttaatgtgagctcagcttcgagatctgcgtagattagggttttttcgcgagccgagcccgccatgcgcccggccctgtccgcggggcccgccgcctgaatgcgctcgccgcctgctcggtggagccgacgccgcgcgcgggggggtcgagggggaggggaggaagatctagcgggagcctgctacgatggttagggatttcgtctactgtatcggcatcgatttcggttgaggcttttcgtttcctcttcttttctgttggggggtggggggtgggggcgcgcgagggaccggtttccgccccggcaatggatgcgtccgcgtaggaggcgcggtccgtgcgaggggaggagggcggtttgcgcgggggggttttgggagttgaagacgggaagaaagtggagcttgtgctgaagaatgagactctcgtcgtcgggcttcaaccatcagtcgccggaagcctcaaatgcaggggagaagaaatgtttgaactctgagctatggcatgcatgtgctggtcctcttgtgtcgttgcctcctgttggaagcagagtcgtctactttcctcaaggacatagtgagcaggtggctgcttctactaataaggaagtagatgctcatatcccgaattatccaaacttatccccacagcttatctgtcagcttcataatgttaccatgcacgcggatgtggagacggatgaagtgtatgctcaaatgaccctgcagcctctaagtccgcaagagcaaaaggatctatatctactgcctgctgaacttggaactcccagtaaacagccaacaaactacttctgc

SEQ ID NO: 216 - DNA, 669 bp, Eucalyptus grandis
cttctcccttcctttccttgaccacgtcgtcgtcctcctctcctccgcgtcgcaaaatccgaaccctaggccgcgcagcgaaccgccggaatccatcgcccgcggaggtcgccgccgccgccgtacatgcttatttatcgcgccgccgccccgccgagcgtattctccttcgatcgggccctatgagccccgcgcgatcgaagccgatcgcgatccgggccgtcttctacgccaacctcgagtccgagttcgcgctgatccggtccgtcgtcgaccggttcccgatcatctccatggacaccgagttccccggcaccgtgatccgccccggccccgccggcgggggcggcggccgagcgctgccgccgccggagagcaactacggcctcctcaaggcgaacgtcgaccggatgcacatgatccagatcgggctcacgctgtcggacggcgagggcaacctccccgacttcggcaccaagtgcgcgtacatctgggagttcaattttagggatttcgacgcggcgcgcgacgtgcagaacccggactcggtggcgttgctccggaagcaggggatcgatttcgagatgaacaggcagaagggcgccgactcggcccggttcggcgagctgctgatgtcgtcggggctcgtctgcaacgatgaagtgagtt

SEQ ID NO: 217 - DNA, 334 bp, Eucalyptus grandis
ccgtggcggttttaacatggagaagctggcgagggggagcgtccaagaagaacatttgaacgccgcagtggcactggacgagggttggtattgtacaccaagaatgttgcattttagctttgaaaacgagtttaaacgagatggagctggtcgtggaaactggggaactcctactgatgaaattgctccggagcctgaagaacctgttgtggaagttgaaaaaaatgtgggatctgagaagcagttggttgatgaggaggctgcagatgctagcaaagagaatcctttgaatgaaccagaggaaaaagagcctgaagataaggagatgacatta

SEQ ID NO: 218 - DNA, 478 bp, Eucalyptus grandis
cagtcgggtttgccgttagatgataggcccgagggagctcgctccccttctccggaacctatatatgataatatggggattaggatcaatacgagagagtatcgtgctcgtgagcgtctgaacaaggagagacaggacattattacacagattattaagcggaatccagcgtttaagcccccggctgattataggcctcccaagctacagaagaagctgtacataccgatgaaagagtaccccggttacaattttattggacttataataggacctaggggcaatacccagaaaaggatggaacgtgaaactggtgcaaagatcgtcattcgtggaaaaggttcagtgaaagagggtaggttgcagcagaagagggatttgaagcctgatccagcagagaatgaggatttgcatgttttggtggaagcggagacacaggaggcactagatgcagctgcagggatggtggagaaactgt

SEQ ID NO: 219 - DNA, 1677 bp, Eucalyptus grandis
ccgttccttccccgttccttccctgatcttccgtcgtccggcggttccccgttccggctccagcaatgtgtgggggcgccatcatctccgacttcatccccaaccagagggcccgccgattgacctcggacttcctgtggcccgatctgaagagatcggccggcaagcagtcgaggcggccggccaggtcggaggtcgtcgatgtcgtggacgatgacttcgaggccgacttccagggcttcaaggacgagtccgacgtcgaggacgacttcgacgacgaggtcgaggtcgacgtcaagcccttcgctttctccgccgccgagcctcggtactccaaaggctcttcgaccaccaaatctgtggagtataatgggcaagctgagaaatctgccaagagaaagaggaagaaccaatataggggaatcaggcagcgtccatggggaaaatgggctgctgagatccgtgacccaaggaaaggggtccgagtttggcttgggacgtttaacacagcagaagaagctgcccgagcttatgatgctgaggctcggagaattcgtggcaagaaagctaaagtgaacttccctgatgattcttccagtgcatcatcaaaacgctctgtgaagtcaaatgttcagaaacttcccaagacaacaacaaacaacgtgcagcctaatctgaatcaaaatttcaattatgcaaacagctctgatgatgacatttacagttccatgggttttgttgaagaaaaaccacctactaaccagttttacatggatgctttgaatgcccaaggggtttctggaatgaattctctttcccctgctgacaatgcccccttgtacttcaattcagaccagggaagcaactcatttgagtgttctgactttggttggggtgaaaatgccccaagaactccagatgtctcatctgtactttcagctaccctggaagttgatgaatctcagtttgaggatgctaacccaaggaagaaaatcaggtctgcttctgatgatgtgtccgaggaagaaaacaccgctgcaaagacattctctgaggagctgtctgcttttgagtccgatatgaagttcttccagatgccatttgtggatggtggctgggatccgtcagtggaagccttacttggtggagaggcaactcaggatggtggaaatgcagtggatctctggagctttgatgacctcgctcccatgatggggggagtcttctaaaagagttaccgttggctggtttttttatgtaaataaggctacatgttagtgagtcctcgactgtctgcctgtcttattatattgagttgttttccgatgttaaaaagtcctagtcaatgagaaagagagattgcttcctaatatgctgcaatgctttcaggaatgatttgtctactgtggtggtggagtaccaaacgtttgaacatggttaagccttggatgaagtgtggtttcccagtcagatatgtggtatattggagtatgctgctgactaggttaagttttaaagtccagaccttcttattggaattttgaacttacgtctgtaatttgatgattatgtgtgataaatgctgaaactctgatgacagcaatagcttgttctgttggccagtgcttctctcaataattgccagggcctgtgataaattgtggcaaaaaaaaaaaa

SEQ ID NO: 220 - DNA, 916 bp, Eucalyptus grandis
cacggcggcgccgccgggtttcttgggccgagggccgtgccgatgaaacaggcaggtctcgcccagaagcccacgaagctgtaccggggagtgaggcagaggcactgggggaagtgggtggccgagatccggctacccaagaaccgcacccgcctctggctcggcaccttcgacacagccgaggaggccgccctcgcctacgacaaggcggcgtaccggctgcggggcgacttcgcgcggctcaacttcccgcacctcaagcacaaggggtcgcacatccagggcgacttcggcgactacaagccgctccattcctccgtggacgccaagctccaggccatctgccaggacatggccgagaagccagccgacggcaagaagaggcgctcggcccccgccggcggcggcagctccgcagctgccgcctcgccgcggaggccggagccggagccggagccggtgaagacggaggtgggagtgtcggcggcgacgtcgtcctccccggagagcgacgacgcgtcggtggaggagtcgtcgccgctgtcggagctgacgttcaacgacttcgtggagccgcagtgggagagcgtgggggtgcccgagaacttctcactgcagaagtacccgtccgagatcgactgggctgctatctattcttgaagccttttttcacttctcatcatcatcatgtcatgtccagttttctccagtagtttcgtcttctttctctttcgaatttccaagaagcgcagtatgtaatatgttaggagtaatttagggaaagcagggggctctgctgcgatggagtttttggcagttgcagcggccactgctaagccttgtatcgtcgtgtaaatccgaccacggtcccgccggggttttaagtcggcggcgccggggatcatctcatgcattc

SEQ ID NO: 221 - DNA, 567 bp, Eucalyptus grandis
gcgttgatctgctcctgatcatggccctgatcgtatggaacgagcatgttcaatctctggcaattctccatgaaactgttagcatttccgctatgaccaccgtcgatggccatcccgtatggaccgcagaagccatggaagccgggcatttccttggataaacctgtctcctccttgggattcttttcttttctcagaccagttaactcagctaaaatgtcgtgtattatattgtgatgtgagaaattacttctaatttgtattatcaccatcttcttctgtagccacactatgaaagatctaagtttgaggcaatgggaagtggtgtctacacctggcaatgaaggaaagacagcgttggagagctgaagaggacgccttgttacgtgcatatgtgaaacagtatggcccaagggagtggcaccttgtgtctcagcgcatgaacactccccttaaccgtgatgccaagtcctgcttagagaggtggaagaactacctgaaaccaggtataaagaagggatccctcagtgaggaagaacagcgtcttgtcttccatttgttgccgtg

SEQ ID NO: 222 - DNA, 985 bp, Eucalyptus grandis
gtggttttgccgtcctcggggatggtgaaatcgagcggaggcgcgggggattctgatcattcagatcttgaagcgtccgtcgtgaaggaagctgatagtagcagagtcgttgagccggagaaaaggccgcgaaagcgaggtaggaaacctgccaatggccgagaggagccattgaatcatgttgaggccgagaggcagaggagggagaagcttaaccagcggttttacgcgctccgggccgtggttcctaatgtttccaagatggacaaagcgtcacttcttggcgatgcgatagcgtacatcaaggagctgaactcgaagctccagaccacggaatctgacaaggagaatctgcagaagcaaatggaatccttgaagaaggaattaacgaataaagactctcggtctgctctgccccagagcgataaagatctcagtatctcgagcaatcacggtgccaagttgatagaattggacgtggacgtgaagataatcggatgggatgtgatgatacggattcaaagcagcaagaagaaccaccctgctgcgaagctaatgcaggccctaatggagttggatcttgacgtgcatcatgccagcgtctccgtggtgaatgacttgatgatccaacaggcgactgtgaagatgagtggtcgtttttactcacaggaacagctaaggctggcgttgtcgtccaaaataggataagcccatcagaagtagaagagggagtgatggtaattaaactgtataaaagagcttgccgatgtttgaattgtcgacgcgaataatcaggggctgggatattttaaggctcccggcacagcaagttctgaagcaagagctgccatatgctgtttgttcctcttgtagttcttagtgtagcctgctagtgtttcttattaggtactttcgattgtggagcactgagaggatatgaaacaaggtggaattgttgttgaagataaaaaaaaaaaaaaaaaaa

SEQ ID NO: 223 - DNA, 335 bp, Eucalyptus grandis
tggagcttaaacctgataagattggtttacagaggagtgagcaattaagagatctttacgagtcgctgcttgaaggggaaactgatgcacaaaacaagcggccctcggctgcattatctccagaggatctcacagacgaagagtggtattacttggtttgcatgtcctttgtattcaatcctggcgaaggtcttccgggaagagcgctagcggatggccaaactatctggttatgcaatgctcaatatgcagatagcaaagtgttttctcgctcactacttgcaaagagtgcatctattcagactgtggtatgttttccctatctcggaggtgtg

SEQ ID NO: 224 - DNA, 377 bp, Eucalyptus grandis
ccaatcttcactccccctatcccctctctctctctctcaagaactaagagcttactatggaaagcgaacgctacgatgagacgacagagaagcagcgaatcaggagaaggccgcaccagaagccgtacaggggtatccggatgaggaagtggggtaagtgggtggctgagatcagggagcccaacaagcgctcccgtatctggctcggctcctacgccaccgccgtggctgccgcccgcgcctacgacaccgctgtgttctacctccgtggcccctctgcccgcctcaacttccccgacctcatcttgcacgagggccaggactcgctgggtgaggtctcagccgcctccatccgcaggcgtgcagctgaggtcggg

SEQ ID NO: 225 - DNA, 394 bp, Eucalyptus grandis
ctcaatctgacttgtcaggggtgggatagcaagaaaagggtctgaaagtttttcttgctgaatcttctttgaccctcggacaatcagacacagcatagatttaatctgcccgaggaaacacaaaagatggctttcactggaaccgtggataaatgtaaggtttgtgacaagaccgttcatgtcgtcgacatgatgactcttgaaggcattccctatcacaaaacctgcttcagatgcagccattgcaatgggacgcttgtgatgagcaactattcctcgatggatggtgttctctactgtaagacgcatttcgagcaactcttcaaggaatccggtgatttcaggaagaatttccattcagccaagtccgacaagccgaatgagatgacaagaa

SEQ ID NO: 226 - DNA, 340 bp, Eucalyptus grandis
gactccccctatcccctctctttctccctctcaagaatcaagagattactatggaaagcgaacgctacgatgagacgacagaggggcagcgaatcaagagaaggccgcaccagcagcagcagcagcagcagcagcggcggcagaagccttacaggggtatccggatgaggaagtggggcaagtgggtggccgagatcagggagcccaacaagcgctcccgcatctggctcggctcctatgccacccccgtggccgccgcccgcgcctacgacaccgccgtcttctacctccgcggcccctccgcccgcctcaacttccccgacctcatctggcgcgaggg

SEQ ID NO: 227 - DNA, 571 bp, Eucalyptus grandis
ccgactcagcaaagccaaagaaagaaaccagaaacagcagaccagaccattccattccattccatttcgcattctctactacagactcgcagagatggtgaagagagacagagaggacgcggaggtcgaagccctggccgtggccaactgcttgatgctcctcccccgagtcggcgagagcgccgtctcgaaccgcgaatcgcggtctacagagcggatgttcgcgtgcaagacgtgcaaccgcgagttctcctcattccaggcgctcggagggcatagaaccagccacaagaagcagaagctgatccccggcggcctcttccacctcggctgcaccgcggattcctcgccagccaagccgaagaggcacgagtgctcgatatgcggcctcgagttcccgatgggccaagcccttggcggtcacatgaggaggcacagggccgccatggcggagggcttggcggcagaggcggcgaagcctgtgccggtgttgaagagatcgaatagcaagagagtcatgtgcttggatttgaactcgtcgctgatggaggacgacttgaccttgcgttta

SEQ ID NO: 228 - DNA, 726 bp, Eucalyptus grandis
atgaggactccctggacaaggaaccccctcctccgcctcctccgagattcaaggtgcattctttctgcaagaccttgactgcctcggacaccagcactcatggtggattctcagtgttgagacgtcatgcggacgaatgcctcccgcaactggacatgtcaaaacaacctcctacgcaagaactagccgccaaggatctgcatgggaatgaatggcgttttcgacatattttccgaggccagccaaggaggcacctactgcaaagtggttggagtgtttttgtgagctccaaaagacttgtcgctggggatgcatttatattcctaaggggcgaaaatggggaacttcgtgtaggtgttagacgagctatgaaacagcaaggcaacgtttcgccatcagtcatatctagtcacagcatgcatcttggtgtccttgctacggcatggcatgccatttctacaggaaccatgttcactgtttactacaaacctaggataagccctgctgagttcatcatcccttatgatcagtacatggagtctctcaagaagaattactccattggcatgagattcaaaatgagatttgaaggggaagaagctccagagcagaggtttactggaacaataatcggcattgaagatgctgacccaaaagggtggcgagatacaaaatggaggagtctcaaggtgagatgggatgagaattctgccatacctcgtccag

SEQ ID NO: 229 - DNA, 752 bp, Eucalyptus grandis
gttcagaggggtgcggaagaggaagtggggcaggtgggtctccgagatccgcctgcccaacagccgggagaggatctggctcggctcctacgacacccccgagaaggcggcccgcgccttcgacgccgccgccttctgcctcggccgccccgccgcgaagctcaacttccccggcagccccccggagatctccggcgcggcgtccctctcccccgatgagatccagtcggccgcggcgagccacgccaactttggggccgtggccgtgccggcccgggccgagctgccccgaccaggatcgccggccccgtcgccttcgctgtcggcctcggaggcgagcagcgtgctgacgaccgagagcgacctgaccctggacctatcgttcctggattttctggatgattcgggcccggtttccggcgagccccatatcgggaagttcccgggcgtggaggaggctcccgacgttttctaccacatgcagttcccgagcgtggagagcgcggggctgaatctcgatactctattggcttcagacagcttcccgtggcgtatctgaagtggactgaaggaagaagcctggccgatcatttctctcttttttttttctttttttttctataattcttttgatggactagattttgtggggtcgtcatccacttcaggataatacagatgacaagaactgactttttatggtgtaaaaagacgtagcttttttgttggttcggttcaaaaaaaaaaaaaaa

SEQ ID NO: 230 - DNA, 563 bp, Eucalyptus grandis
ccgaggccgacttcctggccaaacactccaagcccgagatcgtcgacatgctgcgcaagcacacgtaccgcgacgagctagagcagagcaagcggagctacaggggctccgccgcggaacgggccgggaggggcgggttcgggccggggcggacagagtggtcggccgccgcccgggagcagctgttcgagaaggccgtgacgccgagcgacgtggggaagctgaaccggctggtgatcccgaagcagcacgcggagaagcacttcccgctgccgggcgggccggcggcgacgatgaagggcgtactgctcaacttcgaggacgtcggcgggaaggtgtggcggttccggtattcgtactggaacagcagccagagctacgtgctcaccaagggttggagccggttcgtgaaggagaagagcctgaaggccggcgacaccgtctgcttccagcggtcgaccgggccggacaagcagctctacatcgacttcaagccgcggggccagccgccggccggcccggccgcgccgccgccgccgcccgtacagatggtgaggctgttc

SEQ ID NO: 231 - DNA, 642 bp, Eucalyptus grandis
agtaaacccaccgaccagaacctttgtgaaggttcacaaatcggggacctttgggcggtcactggatatttcaaaattcagcagctatgatgagctgcgcagtgaactcgctcgcatgtttggccttgaaggccaattggaggaccctcagagatcaggctggcagcttgtatttgtagaccgggagaatgatatccttctcctgggtgacgacccttggcaggagttcgtcaacaatgtgtggtacatcaagattctttcccctcatgaagtaaaacaactgggcaaacaaggcatcaaccctgcaaattctgtcccaaggcaggctctctgagtgcatcacggtatttgatgagcatgtttggtcgacagagttgaccgatctgagctttggggtaggcagatgatgggggtcgctggactacttgaagccgagtcgtttggtgtaagaaacggacttggcttctgatagtgtttgaccgtgttgtagtgggtacctatgagaaaaaagagttgtagtaatatattgcttcgagagatgtagtgacgtggtaagtctatctcaagtttgctttataactgtaaagtttaacaccacggatgattgaagagaatgacatcgacattcccgtaaaaaaaaaa

SEQ ID NO: 232 - DNA, 1358 bp, Eucalyptus grandis
cgatttacccccctccctctctcggcatataaaacccgcaggtgaaacccgctctctctcccccacgccttccgcccgactcggactcggactcggccgagtcaacccacgccccccgcgagtcccgaccccccggcgccatgacgcggcgatgctcccactgctgcaacaagggccacaactccaggacctgccccgtccgcggcggcggcggggacggcgggggcgcggcggccgccccctcctcctcctccccctccacctcctcctctggcgccgcggcggcggcggcggcctcggcctccggcggcggggtgaagctgttcggggttaggttaacggacgggtcgatcatgaagaagagcgccagcgtggggtgcctgtccgccgcccactaccactcctcgtcctccgccgcggcatccccgaaccccggctcgtccccgatcgacgggagcgacggctacctgtccgacgatcccgcgcccggctcccgctcgtccaatcggcgcgtcgagaggaagaaaggtaacccatggacggaggaagagcatcgaaggtttttaattggtctccagaaattgggtaaaggagactggcgagggatagctcgtgactttgtgactacaaggactcctactcaagtggcaagccatgcccagaagtattatatccggcagagtaatgctggccgaagaaagaggcgctccagcctttttgacatggctccagatatggctactgctgaccaaccctcacatccagaagaaacatttctgcctcctttggtcagacttaacgatgatactaactcaacaacttcaaccagtatgggactcgatttggaaagaacgcctatggagacctcgcacccagaaacatctgaagggggcggtgatgttgcgatggaatcaattgatcaagtacctcttgtaccctgttacttcccatactatttaccactaccctttcccatgtggccgcccaacatggcgcctcctgaagatggaagggtggtggagacatctcatcaccgtgtgctaaagccaatcccagtaattccaaaagaacccctaaatatcgaccaaatagttggaatgtctcagctaagtcttgctgagaatgaacctgcaccactctctttgaagtttctcggggaaacatctcgacagtcagcatttatcaaggcgccttcttcagtcaatgaatcggatctcgacaactgcaaggatggcgccactcaagcagcttgactcgtgcctaagatcagcgacggtttagttcttgtgaatctttctgtaaaaccatctgtattggtgtcctccttttcctgttgtatctgctttctttaggctttc

SEQ ID NO: 233 - DNA, 506 bp, Eucalyptus grandis
aaataactacctacctttttctaagaactttggctttctttcggaacaggtgaaaagaagagtataaattcagagttatggcatgcttgtgcggggccattggtgtctttgcctccagttgggagtctcgtggtctactttccccaaggccacagtgagcaagttgcagcatcaatgcagaaggagactacttgtgtacccagctaccccaatctgcccgcaaagttgatatgcatgcttcacaatgtgacattgcatgctgatctcgaaactgatgaagtctatgcacaaatgacccttcaacctgtaagcaaatatgaccaggaggcgttactggcatctgatatgggcctcaagcaaagcaggcagcctacagagtttttctgcaagacgcttacggctagcgacacaagtactcacggtggattttcagttcctcgtcgagctgctgagaagatcttcccatcactagattttactatgcagccaccttgccaggagctaac

SEQ ID NO: 234 - DNA, 420 bp, Eucalyptus grandis
taaaaaccatgcagtctctcagccactgaacatggcgcttgaagctctcaactcgcccaccgccgccgcccccttcggccacgacgacgcggacggccacccgtgggccaaacggaagcgctccaagcgcccccgcgcggaccctcaggaccagccctccgaggaggagtacctggccctctgcctcatcatgctcgcccgccgccgccgccgacccggcagcagcggcaggctccacgagtgctccatctgccacaaggccttccccaccggccaggccttgggcggccacaagcggtgccactacgacggcggcagcagtagcagcgccgcccgtgctgcctcttcctcagaagccggcggtcctagccacacgactgtcagccaccgcgagccgatcgacttgaacttgccggcctt

SEQ ID NO: 235 - DNA, 476 bp, Eucalyptus grandis
gcgacacctactccaaagtggttggtcgctgtttgtcagctctaaaaagcttgttgctggtgatgcttttatatatctcagaggagaaaatggtgaacttcgtgttggagttagacgagcgatgaggcaacttaataatgttccatcttcgattatgccaagtcacagtatgcatattggtgtccttgcaacagcatggcatgccatttcaactggtacaatgttcactgtgtattacaaaccaaggactagccctgctgaattcatcattcctttcgataagcacattgaatctgccaaatttgattactccattgggatgaggttcagaatgacatttgaatggtgaagaagctccagaacagaggttctctggcactgtaattggatctgaggatgttgatcctccgaggtggcctggatcaaaatggagatgcctcaaggtgcggtgggatgaaatcacttccattcatcgc

SEQ ID NO: 236 - DNA, 799 bp, Eucalyptus grandis
cttcctctgtgcatgacatttcagaaaatggggaagctgatgaacagcaaaaacattcagaacagcatgagtcctcccctgcaactggagtgcctcatcctggtgtctctttgcccaatgtccaatatgcaacgcctccacaacttggagcgggacatgccatgacaccacctgcttacccctatccagacccttattatcgaagcatctttgctccctatgatgcgcagtcgtacccgcagcagccctatggtgcacagcctatggtccatctgcaattaatgggaattcaacaagctggagtgcctttgccatcagatgcagttgaggaacctgtatttgtcaatgcaaaacaatatcatggcatcttgcggcgtcgacagtctcgtgcaaaagctgagttagagaacaaagctcttaaatctcgcaagccttacttgcatgaatctcgacatttgcatgcattgagaagagctagaggatgtggggggcggttcctgaacgcaaagaaggatgaaaatcagcagagcgaggtttcttcagcggacaaatcacagggaaatatcaatctcaactctgataaaagcgatcgctcgtcctgaggtgcaacttcctgatcaatgcaaagtaatctctttcgtgcatgaatcatgcctgttcatcaatagatttcccctacctagcctagcctcaccaattgccctgctcttctgcttgtaggtcagtctctttagttggtagtgtgaatctgtttgtagttctgagggaaacctgctgcatagatagtagtttcgagtag

SEQ ID NO: 237 - DNA, 298 bp, Eucalyptus grandis
aagtgaaggatatgtttcaagatcaaagggaaaagtacgacacgttcctcgaggttatgaaagatttcaaggctcaaaggactgacactacaggagtcatagcaagagtaaaggaattatttaaagggcataacaaattaattctgggattcaatactttcttgccaaagggatttgaaatatcccccgacgaggatgaaacaccaataaaaaagaatgtggaatttgaagaagccatctcttttgttaataagatcaagaaacgcttccaaaatgatgagcatgtctataagtcatt

SEQ ID NO: 238 - DNA, 521 bp, Eucalyptus grandis
tccttccttctccttctccttctccttcgtctccttcagacatgtcgctcaaccaccccctctctacttcagacggcacccccaacactctctggtggaccactcaccccaccatgttccgccagcacaacctcctcctcaatttcaaccccaccgacgacgacccgcaagacgagggctcgcccccgccgccctacgtcctccgaggggcgccgccaccggcggagccgtcgcctgcagagaaagagcccatgttcgagaagccgctgacgccgagcgacgtggggaagctgaacaggctggtgataccgaagcagcacgcggagaagcacttcccgctggtgggcgaggcgacccagcagctgagcttcgaggacgagtccgggaagtggtggaggttccgctactcctactggagcagcagccagagctacgtcctcaccaagggctggagccgcttcgtcaaggacaagcgcctcgacgccggggacgtggtcctcttcaccgcgaccgcgccgacg

SEQ ID NO: 239 - DNA, 337 bp, Eucalyptus grandis
gcaattcttgctgccggggaggggcaaatcgggaacagacgataaggggatggcacagcgctcggctccggcgcccttcctgacgaagacgtaccagttggtggacgatccggccaccgacgacgtcatctcgtggggggagagcggccggacgttcgtggtgtggaagacggcggagttcgccaaggacctgctccccagctctttcaagcacaacaacttctccagcttcgtccgccagctcaacacctacggcttcagaaagatcgtgccggacaaatgggagttcgccaacgaccgcttccagcggggccagaaagaactcctctccgagatc

SEQ ID NO: 240 - DNA, 334 bp, Eucalyptus grandis
aggatgtggagggacaagatgcgtctcaagcggctaaaggagcagaacaaggggaaggagggagttgatatcgcgaaacagcggcagtcccaagagcaggcaaggaggaagaagatgtcgagagctcaggatggaattcttaagtacatgttgaagatgatggtggcccactggaaacgaggactggtggccccagctgggtttgccgaaggatcaaggagccccgccctacaagaaacctcatgatcttaagaaggcatggaaggtaggtgttctcacggcggtgatcaagcacatgtcttctgatatcgccaagatacgcaagctcgtgagg

SEQ ID NO: 241 - DNA, 422 bp, Eucalyptus grandis
ttttctcccacctccttctctctcctctctctctctctctacagtttcgcggcgaaatcaagtcccccggcgagctaggtttcaaccggcgaagcagccagaagaagaagaagaagccgaagaagaagaagggcggagatggatcagtggaggacggatttgggagcgtcgacttccgtccacccccagcagcaccagcaccagcaccagcaccacccgtccagcaggctgcacgcctcgcacgacgagcccaggcaaagggaggaagcggacgtcagggatcccgtggccgcgaggaaagtccagaaggccgaccgcgaaaagctaaggagggatcgtctgaacgagcacttccttgaactggggagcacgctagatcctgatagacctaagaatgacaaggcaaccattctcacggacac

SEQ ID NO: 242 - DNA, 737 bp, Eucalyptus grandis
aaaaagaccatttcttccgaacacaagaggaggcgggtggtggtggtggtgttgctgcttctggtgccgtccacttccttcttcccacctccatcttcatctctccctccctctctctctctgaatctaccgaacccttctcgccgaaggaggagagagagagagagagagagagagagacgggaagaccatcgctttcggccatcgcgtgcacgagcagtcatgaggagaggcagatgcgccgccgcggccgcgaagagggaggcggccgagatagcgccgccgccggtgccccatgcggctgcggcggcggcggcggaacccagatacaggggcgtccggcggaagtcgctgggccgatacacggccgagatcagagaccccgggacgaagaagctcgtgcggctcggcactttcggctcgccggaggaagcggcgcgtgctttcgacgcgaaggccgtggcgttccgcggggtcaaggccaggaccaacttccccgtcgccccgtcgagtttccctccggccgcttctcgcgatctgcgagctccgttgattgaatccagaaagttcggtcggagaggcgctcgagatcttcgcggcgaccaccacgacgtcagcccgcagagaccgacctcgagcagcttaagcagcaccgtggtgtcgtccagtggtcctcgaccgtcgccgtcgccggagacggcgaagcggcggactaggactccgccgcgccaccgccg

SEQ ID NO: 243 - DNA, 542 bp, Eucalyptus grandis
ctacaatagcaactcagatcccattagagaggaattcatgaaagcactagagccttttatgaaaagtgtttcccctgtttcttctccattatcatcattatcatcttgtgactcggtctttccaaaacaacagcctaatttgaatcctgacctttgctcctcttggatagtaaacccgatgggtctcgagcaatccggctcgattgggctcaaccgactctcccattctcaaatccaacatatccaggacgaaatgctactccgacgtcaaaatcaagaactttggttagcttccgctgtgaaatctcctctccagcacgaaaaattcgaccagtgtcggtaccaaaaccaccacggctctccccatctcctccggccgaaagccctctcaatgaagcgggtgggagtccctccgaaacccaacaagctttacaggggagtgaggcagaggcactgggggaaatgggtggctgagatcagacttcccaagaacaggacacgcctctggctcggcactttcgacaccgccgaggaggctgctc

SEQ ID NO: 244 - DNA, 848 bp, Eucalyptus grandis
gagagagagagagagaggaaggggtgtcatggatttgttcttccacgaagaggttcaaagcgacatcttctggtgcgatcaactggtggagccgccgccgccgccgccgccgccgctgccgccggctaacccaagcgccttttcaccgtatacaaaccggctgccgagtcaagaccgagggttcatgccgaacccggggaataatatgaacaagcgggtgatggagttcttgaggaggagctgggccgaaccgagccagatccaagaattcgaccgcgaacggggttttcgacacatgctgagcgagaggatgaggagggagaagcagaagcgtagctactcggcattgctctccgaattgcctcatggtaccaagaatgacaagaactccatcgtccaaacagcttgcatgagaatcaaggagctggtgaagtacaagcaagagctggagagacaaaacggggagctgaagtctggactgaacgagaagagcggaggggacaaagctgaagggaccaagatcagagtcaagattgcgaacccgacgtccgggattgattctatgttggaggtcctcaagtgcctggacaacatgggactgaaagctacggcgattcaaacgcagtgctcggccgaccaactcttcgccgtgatcgaggttgaaaatgaggtatgtgcacaacaatccgatgccaatgtacactaatcactggttcatgttcttcgcacgtgattttcatttttctcgaatgtaaagtaagaacttgtacgatgttcatgcagcacaagttcgaaattttcccagtccatgggaaggtccggcgtcttcgtttctggtgccaagcatg

SEQ ID NO: 245 - DNA, 181 bp, Eucalyptus grandis
gacatggcgcgacgtggcggaggaaggaggcgaacggcggctccgaggcgtccgacgccgtcttgccgcgagctcatcatcgccatcgttacaagggagtgaggatgcggaagtgggggaagtgggtggcggagatacggcagcccaacagccgggaccgcatctggctcggctcctacgc

SEQ ID NO: 246 - DNA, 117 bp, Eucalyptus grandis
cgagctgctgcagatccagaggaagaggaagaggatggagtcgaaccgggagtcggcgaagcggtcgcggctgcggaagcagcagcacttggacgagctcacgaccgaggtgggtcg

SEQ ID NO: 247 - DNA, 597 bp, Eucalyptus grandis
tctctctctcttcgtttctcccgtttctctctctctacctctcgccaagaaaccgccaggaaaggaaggaaggtaaaaagaaaagaaaaggaagccatggctccgagagaaaagcccagcgtcgccgccatcccaaaccctaacggcgctaaggaaatccgtttccggggcgtccggaagaggccctggggccgctacgccgccgagatccgggaccccggcaagaagacccgggtgtggctcggcaccttcgacacagccgaggaggccgcccgcgcctacgacaccgccgcccgcgagttccgcggcgccaaggccaagaccaacttccccacctccgccgagctgatctcctcctcccgcagccccagccagagcagctccctcgacgagccctcccccccgccgccggccggggccgtccaggccgccgccctcggcccgcccctcgacctcagcctcggccgccaccccgtcgccgccgccgccgccgggcccgggccttacttccccggcgcggccgcaatgtgcttcccggtgatgcccccgccgccgcggccggtgttcttcttcgaccccttcggccgcatggagcat

SEQ ID NO: 248 - DNA, 361 bp, Eucalyptus grandis
gaggctcagtacttcgtgtagccatggggcatgaaagtgaagcatttgaagagtttgttgatgcgcacaaaacttgcttgaatgatctcatgttcttccctactcgtaatgccttggactctcaagtgttgctgcaaatgcagaaaagcttgctgccttgcagaacgaatatcattttgctaaagcaaggattgatgaagatcatgagaaggcgcagcgactggagaagaaggtcaaaactctcacattcggctatcagatgcgggagaagactcttcgagaccaaattgagtcaaccttcaagcagctggacactgcagggacagaactcgagtgtttcccagctctgcagaagcaagag

SEQ ID NO: 249 - DNA, 472 bp, Eucalyptus grandis
ccatcgtcacctgtatccacaaaaacacacccaccttacctctgcacccgccccacccgcctatcgcagggcctgcgatacagacgcttggctgccaagcatgaagagaagccctccgctgtgctcgacaaatcccaagatcccacagacagcgcaaagccatccaagaagccccgccatcgtcacagtcccacccagctcgctgccctcaacgaactctttgagaaaagcgaacaccccactcttgaggagcgaggccagttggctgagaaattaggaatggagaccaagaccgtcaatgcatggtttcagaacaagcgtgcttctactaagaagcgcaataaggggggaacctcggaacctcacccagccacgagtcagaacgacttgtccgaagatgctctcaaaaccccttccgcactgccgtcgatagcgaacctgctcaacgacgcaccctcatcggcctcgccgc

SEQ ID NO: 250 - DNA, 302 bp, Eucalyptus grandis
ccccgcccacttatctgctatcctcgctacttcgctctattagtacctccacaatcccatgcgcaaacgccaacgcaccctcgacatgcacgccggcgcaccaggtcccaacgatgccattgacgcgaacagcgtcggcgacaacgcgttcatcgcggatcacgacgcaattgactcggccggcgacgacgacgacgacgaagacaagcccaagaccggccagaagcaaggccgccgcaaaataaagatcgagtttatacaggacaaatcgagacgccatatcaccttctccaaaaggaaag

SEQ ID NO: 251 - DNA, 708 bp, Eucalyptus grandis
gatcacgttccttcttcgagtgctctggacagtaggagctcctcaaaccgtacttctggggtgaccttagcagaggttttaccaacacccgggcagtctaagagttcagctgattcaggcttttgtgtcagtcatcttggtggggttcctgattcacaatcttcttcatacgcagcagagcatgttaatacacatcagactcaagagatacatttgccagtgccgcaggacaatgcagatctccctgatgcaaactttttggtttcggaaactgcaagtcctgactatcttgaaactctgtccgcagctttagatgggaccatggatgtcgagtcagatgctttttcttctgaacgagatgcgggaattatgctggatgatgtaactaatcttccagcgatcagtgatgtcttctgggaacagtttcttgcggcaagtccacttactgcagacacagaggagattagttcgacctctcatgaaactggcatcacgaatgatcaagagtcacacactaaggtggagaatggatttgagaaggcccattacatggatcatcttaccaaacagatgggtcatctcacctccaacaacggaacaggatgatatgttcttatctactttgtacactggataatctctttcagactagaggtgaatgccaatgcaggatgcgaataacaaattatgccaaaaaaaaaaaaaaaa

SEQ ID NO: 252 - DNA, 563 bp, Eucalyptus grandis
atttttcaactccccccccccaccccgaatcaaatcccattccctctctccctccctccctttttttcccccaatcttttgttgcgttttcaagcacccacgccccccaatctccaacgccatcaatcaagctcaagcaccatcacctcaagaagaaagaaggaaagaaagagagaaggaccggagacccgacagagggtcgcgcgcgcacgagacatgggacgatccccttgctgcgagaaggcgcacaccaacaagggcgcgtggaccaaggaagaggaccagcgcctcatcgactacatccgcctccacggcgaaggttgctggcgctccctccccaaatctgccgggcttctcaggtgcggcaagagctgcaggctcaggtggataaactacctccgccccgacctcagcgcggcaacttcaccgaggaagaagacgagctcatcatcaagctccacagcttgctcggcaacaagtggtctctgatcgcggggagattgcccggaagaaccgacaacgagatcaagaactactggaacacccacatcaagcgcaaagct

SEQ ID NO: 253 - DNA, 397 bp, Eucalyptus grandis
cctcgatgtaacgaaacgagctgcacgaggaatttgccggtagagagataaagaggagcgatggagatgaagggaggggtcgtcccgaaagaggaggaggcgtcgtcggacgtggggcagccgccgccgccgccgccgccgccgccgcagcccatggaggggctgggcgaagcggaggccgcgccgttcctgacgaagacgttcgagatcgtggaggacccggcgacggacccgatcgtgtcgtggagcgaggggaggaacagcttcatcgtctgggacgcccaccagttcgccgtcaccctgctccccaagcacttcaagcacggcaacttctccagcttcatccggcagctcaacacctacggtgtgttcgatgagtatgatactgcaagtttta

SEQ ID NO: 254 - DNA, 353 bp, Eucalyptus grandis
gaattacacccaaccaaaccaaaagagtcataattcaggatccaccttgtttagttaagcaagaataattttcccttcccttttctctttttgagccctttagagttacatgtcttgggtagcaatgacggggaactttgggtggggctcaaactccatggaagaggcgtggaggaaaggtccctggactgctgaggaagacaagttactcattgagtatgtgaagttgcatggggaaggaagatggaactctgtagctaggctcacagggctcaagaggaatgggaagagctgtagattgaggtgggtgaattacttgaggcctgacctgaagagaggtcagataacccctc

SEQ ID NO: 255 - DNA, 541 bp, Eucalyptus grandis
accaccaccagtaccaccacctccctctctctctctctctctctctctccttttccctctgttcgtgttcggtacgattgcgaagcggaaagcgaatgctcctctccggattgccatgaactccaacgcttcctccaacccccagtcgatggccacctccacgacgtcggcgaccacgccggcggcgggcggcgacggcggcaagaaggtcaggaagccctacacgatcaccaagtccagggagagctggaccgaggaggagcacgacaagttcctcgaggccctccagctgtttgaccgcgattggaagaaaattgaggattttgtgggctcaaagactgtcattcagatccgaagccatgcccagaaatacttcttgaaagtccaaaagaatggggcagttgcacatgttccacctcctcgtcctaaacgcaaagctgctcatccctaccctcaaaaggcatcgaaaaatgttttagtgccgctgcaagcatccatggcccagccttcttcaacaaatcctgcttttacaattacacct

SEQ ID NO: 256 - DNA, 477 bp, Eucalyptus grandis
agatagtccaagctctctgcctctctctctctctctcttctctatcttcatcttcgtcgtcttgatcgctctcatctcgctctcgcgaatgttgtctctcgtcttctcctctgtccgccattcaaagatcacctattctttccgtttggtttgcggtgactaagaactctttctctctctcgctctgtgtcactcttgctttctcccgacttttctgggattgatgaaaatggcggaaagatcgaactcgtcggacccggaaacaagcccctcgaactcaccctccacctcctcgtcttcttcctcgtactcgcccgacccgcgccgccgggccggctcgcccgccgcggcccgcgacccgttgagatcctccaagcggagcaagcacccggtgtaccgcggggtccggatgaggaactggggcaagtgggtgtcggagatccgggagccccgcaagaagtcccgcatctggctcgg

SEQ ID NO: 257 - DNA, 351 bp, Eucalyptus grandis
ggaaatggaggtcaaggtttaggatggccgggtttcaacagttcccattgagttctgcagttactgatgctgtcagaaatctattaagggaatataacgagaattatagaatcgaagagaaggatggagctctttatctctggtggaggaatcgagctatggcaacttcttctgcgtggtggtgaaacttgtgggttttgacgagtctgtaaagttttgtactagttgtagttcatgtttagcttgatgattagctttaattctacttccataggatcaagggagcaatgtctagaacttccactacactgtcataaaattcccaacttgaatttgaaaaaaaaaaaaaaa

SEQ ID NO: 258 - DNA, 360 bp, Eucalyptus grandis
tggtgtagggttccctgatcctgggcccgacaatggccaggtgctggatgctcgggacccactggccgagaagaaacttgaacttgcaacctgccaaaggagggtagaagaagaaatgctgaaacattccaaggcagtggaagtgacgaggacaagtaccttgaacaatcttcaaacgggtctgccaggagttttccaggcattagccagtttttcatccttgttcatggaggtccttgacacggtatgtacccgttcttatgctatcaaatagacatatgtatacacattctttcggtccggtatttttgttgaagtgggaaagatgagagctgggtaattttggcggttagctctcgc

SEQ ID NO: 259 - DNA, 318 bp, Eucalyptus grandis
tccttcctccctccctctcgccccttctgaatagcccgagatatttaattctctctcctccgtttctctcctcctcccgctcctcctcctccatcatttcctcctgaaccttctggaatccgtcatcgtctcgccagctccgatcttgtccccctcgctgccatggccgccccgccggcggagcagagcggctcggcctccggcggagagagccagcgctccgtccccaccccgttcctcaccaagacgtaccagctcgtcgacgaccccgccatcgacgccgtcatctcctggaacggcgacggctcctccttcatc

SEQ ID NO: 260 - DNA, 503 bp, Eucalyptus grandis
cctaaatcagctgcgaagtcgtcttatcctcttcgattcctgaagaatcgtgtcgctcttctcctcctcctcgacgattaagaatccgattttgatcgcggcggtcgatcgtcggcggctccgattcggcggcggcggaggcggaagatcggttgctcggcgcagcttcgcgtttttccggctcgaatcgcgctgccgggtgaggtaggtgagtgtcgggatcgtgtttttccggaggtcttcgcggcgtcgcttctgtttgatcggattgtggtctgattagccccccctaacttacgccggcgtgtttgggttagggttcggttcggttgggggtgtttcgaagatggacccgatggatatagtggggaaatcgaaggaggatgcgtcgctccccaaagcaactatgacaaaaattataaaggaaatgctaccgcccgatgttcgtgttgcacgagatgctcaagatctattaatcgagtgttgtgtagagttcataaacc

SEQ ID NO: 261 - DNA, 546 bp, Eucalyptus grandis
agaagcgctgagttcttggtcaaagtctagcagtttcgggttctccatcaatcgagtcggagtgggagaaaatgagcacaaatggtttgctgaagtttgaccaaagtctttagtgagatggttgctgtctccccgttctcctccaaacagatgtctgatcaaataacttacttgaccgccagtatgaactctcctttagcccagcttgttaacccaagaaggatgcacacctacgagccatttgaccagttccccatgtggggagacaccttcaaagctgacaaggtcaaaaatctcgaggcatcgtcatctgtgatcgtgcatgcagtagatgatggattggacaagaagtttgaatatgtttctcatgaatcggcagaaaattccagctccaggagcgatcaagaagcaaatagacctgacaaggtacagagacgtctagcacagaaccgtgaagctgctcgaaaaagccgtctgcggaagaagaaatatgtacaacaactagaatcaagccgcttgaagctagcacagttggagctggaactc

SEQ ID NO: 262 - DNA, 883 bp, Eucalyptus grandis
gcttcgtgtacgggatcattcccgagaagggcaagccagtgagcggtgcctccgacaatctccgagcctggtggaaggaaaaagtgaggttcgaccggaacgggcccgcggcgatcgccaagtaccgggcggaccactcgatccccgggaacggcgaggacgcggccaccatcggccccattcctcacaccttgcaagaactgcaggacaccactctcgggtcgctcttatcggctctgatgcagcactgcaatccaccgcagcggcgattcccgctggagaagggcgtggctcctccgtggtggcctacaggagaagaggagtggtggccccagcttggcctgcccgccgaccagggacctccgccctacaagaaacctcacgatctcaagaaggcttggaaggtgagcgtcctcacggctgtcatcaagcacatgtcgccggacatctccaagatcaggaagctcgtccgtcagagtaaatgtctgcaggataagatgaccgcaaaggagagtgccacgtggctcgcgataatcaaccaggaagaagctctgtccaggaaattgtaccccaatagcttcccgcccgtgtgttcggacagtggatttgggtcctatgtcatcagcgatgctagtgattatgatgtggaaggagctgatgatgaaccaaagttcgaggcggaggaatgcaagccttttgatccaagtgcttttggcatcgggccaagggtgtctacaggcgagcttttgatccatccactggtttctcaaatcaaaggagaagttaatgaaaccaaaaccaattcgcggctagtttcaaagaggaatcaaccatccgatgagccgaaggcgaagatggatcagaagatatacacatgcgagtt

SEQ ID NO: 263 - DNA, 454 bp, Eucalyptus grandis
gttcgacgagttcacagcgagctgacaaatcattgatcatggagcatgagtttagttcggctaaaatcaaagctcttcttgagattctacagtcgcaatgcagaggagaaagtgcaaatgcagagcttcatggtcccatgggctgtgacgatgagtctctttttgaaaatacaggcaccggggattctacatacagagttaaagctgttaagcacacaactgtttattcaagttctcctcctgaaggaccaattaaagcaattgtcttttctcagtggacgagtatgttaaacttggttgaacaaaatctgatccattttggcataaattatagacggcttgatggaacaatgaccctttctgcaagagacaaagctgtgaaagattttaacaccgatcctgagatagtcgttatgctaatgtcattaaaagcaggaaaccttggtctaaacat

SEQ ID NO: 264 - DNA, 579 bp, Eucalyptus grandis
agtgaattcggtggggagttaatgaatccaagaagcaactggctaattgtatataatgatgatgagggtgacatgatgcttgttggggatgacccgtggcaggaattttgtggcattgtccgaaagatttttatttatactagagaggaggttcaaaagatgaagccagggactattagtgccaaagatgaggacaatttgatggtcgatgaaggggtgttttcaaagaaaatgacttcggacacgctgccttcggcgtctgacccaaagaactgttaaaattctctcatgtctgtgaggtctttaaagtcattggagaagcctaatccagccgctacagttccctgatgctgaaattcatctttgtccacggggactgcacataatcttctctgtctatatcctctgtgcttcagtgaccattttctgccccgcaaagccgtatttgtatcatcaatgggattcttggatttggcttcaagatgcatggccccctgaggaggccagagagcctgacagagaactacggcagattgaaaaggagagaaatgaggcctgttcgtattcagcattttgaga

SEQ ID NO: 265 - DNA, 366 bp, Eucalyptus grandis
atcgaggccctgaaaaaacggttggacgatgtgaatgccaagtatgcggtctcggtcgagttcaccaaggccatggcactgaaccacctcaagaacggcctgcctcgcgtttttaaggcattgatggaattctcaggtgcttgcactaaggtattcgaggctttgaataacccccgcgagcaggtaggcagtcgtgagaatgagccgcgggttttgcctgcgtgatttcatggatgcctcaggccgtgtgtataatttgtttcaacatttggtaaaccttgataaggtgtcattgcatttgcatagaaatactgtgaaattcttttttaattttggtttgatcttagcttgaaaaaaaaaaaaaaa

SEQ ID NO: 266 - DNA, 376 bp, Eucalyptus grandis
gcagattctccccccgaacgccaagatctcgaaggaggcgaaggagacgatgcaggagtgcgtttctgagttcatcagcttcgtcaccggtgaggcctcggacaagtgccacaaggagaagcgcaagaccgtgaacggcgatgacatcgtctgggcacttgggtccctagggtttgatgactatgccgagccgctcaagcggtacttaaatcggtatcgggaggtcgaaggggagagggccagccaaaacaaggtcacaggcggcgaatcaagaaacgagaagaacttgtacggggatgagtcgccggagaagcagctgggcgctgcctcttcgtcgcctctgaagttctttgatgtggccgacaggagtaccaat

SEQ ID NO: 267 - DNA, 341 bp, Eucalyptus grandis
gtcaactcggtgttcgagctgcacaagctgctggcccgcccgggggcgatcgagaaggttctgggcgtggtgcggcaggtgcggccggcgatcgtgacggtggtcgagcaggaggccaaccacaacgggccggtcttcgtggaccgcttcaacgagtcgctgcactactactccaccttgttcgactccctggagggctgcgccagcacgcaggacaaggccatgtcggaggtctacctcgggaagcagatctgcaacgtggtggcgtgcgagggcgccgaccgggtcgagcgccacgagaccctcgcccagtggcgggtccgcctcggcggcgccgggtt

SEQ ID NO: 268 - DNA, 343 bp, Eucalyptus grandis
tcgctgttcaatacctccaagtcgaacaagcacctctgggagcagatctcgtccaagatgagagagaaagggttcgatcgttccccgaccatgtgcacggacaagtggaggaacctgctgaaggagtataagaaggccaagtaccaggatagaggatccgcgaagatgtcgtattacaaggagattgaggagattctgagggagaggagcaagaataatcagtataagagtccgacggcctcggctttgaaggtcgatccctacatgcagttttctgacaaaggcattgaggatgctgggatgactttcggacctgtagaagcaagtggtaggccgactctca

SEQ ID NO: 269 - DNA, 546 bp, Eucalyptus grandis
atgacctcgaactaaaagtgcgagaactggaaactgtcatgctaggacccagctcagatatgccccacacggttgatatcaacttcttggttggatctggccagatgtctcaggagacggagacattgatggagattatctccaggagggacctaaaggagattctctgtgcttgtgctaaagcagttgaagacaacgacaccttaaaatttgagtgtttaatatcagagttacgcccgatggtgtctgtttccggtgacccgatccaacgattatcagcatacatgttggaagggctcatagcaagattggcaagttcgggaagctctatttacaaagctttaaagtgcaaagagcctgctggtgcagagctgctatcgtacatgcacattctctatgatatatgtccttatttcaagtttgggtacatgtcggcgaacggatcaatcgcagaagtcatgaaggacgaaaacattatccatataatcgattttcagattgctcagggaggccagtggatcaccctgattcaggctcttgcagcac

SEQ ID NO: 270 - DNA, 283 bp, Eucalyptus grandis
ccccattttcccgtttctcccatattcctcaagcactctcatttagggaatgagtgcttagaagccacctcaagtttcaaatttttttcctgcgcagttctcaattcaaatggcacgtagctcatgtaatcagaaactgaggaaaggtttatggtcgcctgaagaagacgagaaactgttcaattatataagtagacatgggttgggatgctggagttcggttccgaagctagctggtttgcagagatgtggaaagagttgcagattgaggtggatcaactat

SEQ ID NO: 271 - DNA, 377 bp, Eucalyptus grandis
atttcttcctggttcttgatagaagattgaaggttctagaacaagaggaagaaagctagtgcaaaagaaagaaagtaaaaagaggtatttctgctgctttattagtttattgtggagtatggcaagtggaatggagaaccggggggaaattcctgcgaatttgaagaaacagcttgctctggctgtgagaaaaatccaatggagctacggaatcttctggtccatctcaaccagacagcctggggtcttggagtggggtgatgggtactacaatggagacatcaaaaccaggaaaacaattcaagctgtggaacttaatactgaccagattggtatgcagagaagcgagcaactgagggaactatatgagtctctat

SEQ ID NO: 272 - DNA, 548 bp, Eucalyptus grandis
ggaatatccagaggaatgagtaccataatctttttaacttcatcagtgggaaggggttgaagatcatgaacttgggagagcagggcgctgatggagtaccaggcgttcttgatgtggatgacgacgatgctgtcgatccccatcttgagcgcatcaggattgaagccggtgtagatgaaagtgatgaagaggatgaagattttgtcattgataaggatgatggaggatctcctactgatgattctggagatgacgagtccgatgtcagtgaaagtggagatgagaaggagaaagagaagtatgggaaaaaggaatctcgaaaagaagtcaaagcatcatcaagcaagaagaaagcaaaagctggagatgaagaggggtcgaagaagaagaaacagaagaagaaagaccccaatgcaccaaaaaaggctatgtctggttataactttttcttgcagacggaaagcgagaaaatgaagagaactaatcccggtctttcctttggggatgtatcaagagaaattgcagacaagtggaggggtttgtcagcg

SEQ ID NO: 273 - DNA, 420 bp, Eucalyptus grandis
tctctctctctctctctgtgaagatcctctctagcgataaatcactgttgcccatttcttccttggctccgttctgttgcttcctctctctgtcttcgacacttcaactgtgcgagcccaaaaatcgatccttttctgcttccttttgcctctgttccaagagtcaattgatactgggtcgatctggtcggcaacttttgttggaagtttgaggaatctgattgagagaagaggtagatctaaaggatcaaaaggatgtcatttaccggcacccaagttaaatgcaaggcttgcgaaaagacagtttatcctgttgaacagttatctgcggatggggttgcataccacaagtattgcttcaagtgcagccactgcaaaggcacattaaagctgagcagctactcctcaatggaaggagtt

SEQ ID NO: 274 - DNA, 454 bp, Eucalyptus grandis
gataaatcgtcttcaccagtacctccgcaggatcagacgggtgttcatgtttatcatcctgattgggctgctatgcatgcatactatggtccaagagttgctcttccgccttattataattctgctgtatcatctggtcatggtcctcatccctacatgtgggggccaccacagcctatgatgccaccatatgggccaccttatgctgcaatatactcacatggaggtgtttatggacatcctgcaattcctcttactccgactcccttggctgcggaaactcctaaaaagtcatctgctaattctgataatggactggtgaagaagttgaaaagttttgaagggcttgcaatgtcaataggcagtgggggggatgcagacagtgctgacgatgggactgataaaaggtcatcacagagtgcagactcgggagactcaagtgatgaggatcaat

SEQ ID NO: 275 - DNA, 620 bp, Eucalyptus grandis
gcgatttaaacagctactggaggaggcatcacaggatattgatcacacaactgactattacacttttagaaagaaatggggcaatgatccacggtttgaggccttggatcggaaagatcgagagaatttattgaatgaaagggtcctccctttaaaaaaggctgctgaagaaagggctcaagcaatgcgtgctgctgccacttctagttttaaatccttgcttcgagatagaggagatataactgtcaattcccgttggtccagggtaaaggatagtctcagggatgacccaagatacaagtcagtgaagcatgaagacagggaggccttgttcaatgagtatatagctgaattgaaggctgtggaagacagagaagaaaaggaggcaaaagctaagagggaagagcaggagaagctgaaggaaagggaaagagaattgcgaaaacggaaggaaagagaagaacaagaaatggagagggtacgagtgaaaatacgcaggaaagaggcaattgcatcttttcaagcattgcttgttgaaacaatcaaggaccctcagcttcctggacagagtcaaaagttaaacttgacaaagatcctcaggacgtgcgagtaatcctgat

SEQ ID NO: 276 - DNA, 340 bp, Eucalyptus grandis
gagataaagaactactggaatacaagaattaagcgactgcaacgcactggcatgcctatatatccaactgaggtttgtctgcaagtgtcaagtgagaatcaagaaactcataacatgggtaacttgcatactgcaggcgaagataattgtgatctctcacaggcagatccactcgagatcccagaggtggattttagaaaactggaactgcatcttggtttctcgtctttttggtctacacttctggacgttcctccttgtggctttgggagagaggcaatgtgtctatctgatgcttactgccttccatttccatcaagccggtctcctaaacgccttc

SEQ ID NO: 277 - DNA, 351 bp, Eucalyptus grandis
cgacgacccgcatacccgctgccaatctggaggacctatttgacaaccataacatggctcgaatacgggacgtatgggccccgaatcttgagatagagatgcagaacatccgcgaggccatcgagaaatactcgtatgtttcaatggacaccgagttcctgagtggggcgcggcccataggtaacttcaaaacgtcctcggactaccactaccagacgatgcgctgtaacgtcgaccttctcaagatcatccaagtcgggatcacgctggcagacgaggaggggttgttcccgcaggactgctctacgtggcaagttcaactttaaatttagtctttggcgacgacatgtc

SEQ ID NO: 278 - DNA, 337 bp, Eucalyptus grandis
gcagccgagtcgagcaagaaactaacgaacgcccggtgtcattaggattcataatccacaagaacaaaagaaaaaaggatcatgggaagatccccatgttgcgaaggcaatggcctgaagaaagggccctggtcttctgaggaagacaagaagctccttgattttatccagcagcacggccatgggagctggatctctctccctaaacgtgcaggtcttaatagatgtggcaagagctgcagattgagatggataaactacttgtggccggacatcaagagagggagtttctccccggaagaagaacaaaccatcttgcatctccactccgtgctcg

SEQ ID NO: 279 - DNA, 383 bp, Eucalyptus grandis
ctccaacgcgcgccttcttctcctggactcctctgagctctctccatctcctccggctcggcgcggccgtcgctcgacggcgacgactcgagggtttccatataattcacttgaaagaagctgcagaatgccgtggaaaacaggacttaccggctctaaaacggaagaagataaggctctgcagctttgtcgggagagaaaaaaatctgttaggcaagctgttgatggttggggctcccttgtgtatgcacatttcatgtttgtgcaatcattaaggaacgtagggacagctctcacaaagttctttgaaacagaatctccaaatgggtctccctcgtatgcctcaatgagtacaacacctgagccaatcgcattaaccgaga

SEQ ID NO: 280 - DNA, 312 bp, Eucalyptus grandis
ggtttgctcagatgcagcaagagctgcaggctcagatggactaattacctccgtcccggtatcaagcgcggtagcttcacggaccaagaggaaaagatgatcgtccaccttcaggctcttcttggtaataggggggcggccatagcttcgtaccttcctcagaggactgacaatgatatcaagaactactggaatacccatttgaagaagaagctgaagaagcttcaaggccaagcaaatcctgatgatgatgaccataatcatcacccacaagggttcaacgcaacttcacactccaaccccaagggccag

SEQ ID NO: 281 - DNA, 311 bp, Eucalyptus grandis
gagatggcgaggacaccatgctgtgagaagatggggatgaagaaagggccgtggactccagaggaagaccagatcctgatctcccacatccaccagtttggtcactcaaactggcgtgcacttcctagacaagcaggtctgttaagatgtgggaagagttgcagactccggtggataaactacttgcgacccgacgtgaagcgagggaacttcaccgacgacgaaagagacaccatcattgaacttcatcaagttcttggcaacagatggtcggccatagcctcgagattgccggggcgaacggacaatga

SEQ ID NO: 282 - DNA, 378 bp, Eucalyptus grandis
catggacagctgaagaggacaagaagctcatcaacttcatcctcacccatggccaatgctgttggcgggctgttcccaagcttgctggactgctgcggtgtggaaagagttgcaggctgaggtggaccaattacctgaggccagacttgaagagaggccttttgtccgagtatgaagagaaaatggtcattgacctccatgcgcaacttggcaacagatggtcgaaaatagcctctcacctcccgggaagaacagacaatgagatcaagaatcactggaacactcacatcaagaagaagctcaagaagatgggcattgatcctctcactcacaagccattagtcaccaacaacgacaacacaaccgatcaacaacccc

SEQ ID NO: 283 - DNA, 389 bp, Eucalyptus grandis
ctccctcctcctccaaacgtttccgtttctctccaagctgaacatggacaagaagccagacgacgacagtggtaagtcccaagatgtcgaggtgagaaaagggccgtggacgatggaagaggatctcatcctcatcaactacatagcgaatcacggcgaaggcagttggaactccctagccaaagctgctggtctaaaacgtaccgggaagagttgtcggctccggtggctgaactatctgcgacccgacgtccggagaggcaacatcactactgaggagcagctcctgatcatggaactgcatgccaagtggggaaacaggtgagatgcacataagtcacacaacttttcgttacataggttctacaacataatacccatcgatcata

SEQ ID NO: 284 - DNA, 385 bp, Eucalyptus grandis
ccaatggtgacagtgttaaggatgaccttgatacagatgaatatgaaactcatgccacagttttggataagctattagcatgggagaaaaagctctacgaagaagtgaagcaaggtgagcacatgaagctagagtatcagaaaaaggtggctttgctaaacaagcagaagaaacgtggtgctagtggtgaatccctggagaaaacaaaagcagctgtaagtcatttgcatacgacatacatagttgacatgcagtccatggattcaactgcttcagaaataaaccacataagggacaaacagctgtacccaaagcttgcgcaacttgtcgatgggatggcgaatatgtgggaaaaaatgcgcatgcatcatgataagcaggagtc

SEQ ID NO: 285 - DNA, 461 bp, Eucalyptus grandis
caccggaaacagtccatgttcagaattattctccaattcatcaaatgggcattgatggattctttccagcgcatccctccccacagaatccttcgtaccattcttactcccccaacaatagacccaatttccctcctccgtcccctcaaacttcacagtgggactatttttggaaccccttttcatccctggactactatggataccccactcggagtagtattgatcatatggctatggatgatgagaccagaggattgaggcaggtccgagaggaagaggggattccagacttggaagaagaaactgagcacgaagaatgtgatcaccactcgtatgttgatgaagatagaggcaacagagatgctaatttccccactgaggaagttttagtggaagatgttgatgacgaggaagaggatgaggatgaaggaaacagacacagctgtgaatctgaggat

SEQ ID NO: 286 - DNA, 438 bp, Eucalyptus grandis
gtactgcgggctcagctgatggaattgaccgacaggctgcggtccttgaattcagtgcttcaggtcgtggaggtggttagcgggctcgccatcgatatacccgagatacctgatccgcttatgaacccatggcagctgccctgcccgatgcagccaattacggcgtctgccgacatgttgcagctgtgagcatcagattggaagtgtaaaagttggggctgattcttttggagtccccttctggggggatggtagatccatagccatttgctgcttttgtttttcttgtcaattccgttctctttcttgaagttggaactccaatatctgtatgcgtctgtctagatggactggcgcttttatgtctgcttgacattgtacttggctgttcttgcttgttacttatgggatgttcctgttctaaaaaaaaaaaaaaaa

SEQ ID NO: 287 - DNA, 405 bp, Eucalyptus grandis
ctgaccttaacagctgcaagcactgttatatttgcagagctatcgtggacaccgggtgatctgatccaagctgaagatcgtgctcacaggattggtcaggtatcttcagttaatatatattacctgctggcaaatgacactgttgatgacataatatgggatgttgtccagagcaagttggaaaatttgggtcaggtgcttgatggccatgaaaatacattggaagtctcagccagccaaccaactagaaacagccctgcaaagcaaaaaacctttaatagccctggcaaacagcatacatttaatagccctgggaagcagcaaaaatttaatagccctggcaagcagacaacactcgactcgttcatgaagcgttgcaatagtggtgacccctctgaacatcag

SEQ ID NO: 288 - DNA, 515 bp, Eucalyptus grandis
ccctcttcctcttcctctccctctctctgtcgcagagctccgtctgaactcgcagaatccacgcgcagagcgacccaagagtgtttcagaacagtccgtccatggccttggaagctatcaactctcccaccgcggcctcagcgccgttccagttcatggaggagcccttgagctcccgcttcttggagcccctgaacaagcgcaagcgctccaagcgcccccaccaccctccctccgaagatgagtacctcgccctctgcctcatcatgctcgcccgcagcggcgccgcccccaagcccaaccaccacgcctcgcccgctcctcttcctcctcctcctcctcctgcgcccactaagcctgaagaagccgcggcgaccgccacggcaaccgcggccccggcgaataacttgagctacaagtgcgccgtctgcggcaagggcttcccctcctaccaggccctcggcggccacaaggccagccaccgcaagtcggccgccgccgccgccgccgccgcc

SEQ ID NO: 289 - DNA, 375 bp, Eucalyptus grandis
ggcaattgctcttgtcctagccaaacgggaaatcatccgtagcataggcactggattggactggtcctcaccttcggcaggttcatcgacaagtttgcctgaaattaaaggaacccttgtcatatgtcctgtggttgctgtgactcaatgggttggtgagattaattgctccactgcccaaggaagcactaaggtcctagtatatcatggagcaaatagaggaaagactgctgatcagttcaagaactttgattttgttgtaaccacatattcacttgttgaaggcgagtacagaaaatttgtgatgccacccaagaagaagtgcatttattgtgggaagttgctttacaaggagaaaatgacagttcaccttag

SEQ ID NO: 290 - DNA, 590 bp, Eucalyptus grandis
cccagatttaccaggagatgacttagcattggaattcgaggaattcgatttccagagcctgttcgacgaattatcgcctgatgccgcgggccttctcgacgccagcgatgtcgatgcttcgtctccgggatcgctgtcctcgtggatcggcgagatcgagggcatgctgatgaaggacgacgaggaagccgtcgccgtcgagccgagtcaggaggtcttcgatcgcttcttcgccggcttgctcgttgattcccccgagggcggaccggccgaggcgaccgacggcgcgagcgacaaggagtccaattcatccgacggcggcggcggcggcggcggcgaacgggatgagaagctggtcgtcggagataacgagctttccgaggacgctgatgatgatgatcccgtctctaagaaacagagaaggcagctcaggaataaggatgcggcggctaggtcgagggagaggaagagaagttacgtgaaagagctggagatgaagagcaaatatatggaaggggaatgccgcaggctggggcggttgctccagtgctttgtggctgagaatcaagctctgcgtctgaatttggaga

SEQ ID NO: 291 - DNA, 307 bp, Eucalyptus grandis
gtgatttcgagtcagagcatgcaccttggagttcttgcaactgcctcccatgctgtcacaactcaaactctgtttgtagtttattacaagccaaggactagtcaattcatcataagcttgaacaaatatttggaggctcttaacaataaattcacagttggaatgagattcaagatgagatttgagggtgaggattctccagagagaaggttttctggtacaattgttggggtggaagatttctcacctcaatgggataattcaagttggcgatcattgaaggttcactgggacgaacatgcgtcat

SEQ ID NO: 292 - DNA, 209 bp, Eucalyptus grandis
gttcaatcagctcgacccgaggatcaacaggaagcccttcagcgaggaagaggaagagaggctcttgactgcacacaagctgtgtggcaataaatgggccatgatcgctcggctcttccccggccggacggacaacgccgtaaagaaccactggcacgtgatcgtcgcgaggaagcagagagagcagtccaacaacgcccgcggccgga

SEQ ID NO: 293 - DNA, 224 bp, Eucalyptus grandis
ctcagaagtacttcatcaggcaatctaacgtgtcaaagagaaaacgacgttccagtctgtttgatattgtggcagaggaatcggttgatgtgccaatgggatcaagggacttctttgcggtcgacgagcaacagcaggaaacagaagtaaatgatgccttgcagcagctgccacctgatgttgatgaagaatgtgaatctatggactccaccaactcaaatact

SEQ ID NO: 294 - DNA, 185 bp, Eucalyptus grandis
ttcttcttcttctagacatgaatctcgacatccaatccctcttctaaccaatgggcagccgatgtctggtgaaatcccctgtgctagtattgacagcccatctgttaggactacatctggacctctgggtccttttgataaacatgtgcactcgcttccctatgttgatcccagacagccagttc

SEQ ID NO: 295 - DNA, 428 bp, Eucalyptus grandis
tcagcccgcccctctccgcccacgtggccagccacaaggggctccatcaagcgagcaagcccaagatccacgagtgcaacatatgtgggtccgagttcgcgtcgggtcaggccttgggcggccacatgaggcggcacaggtccgccccgccgccgacggccaccagcgccgacgcgacgagccccaccaacccgccggctgctgcggccatcaccaccgagaagtcccgcaacatcctctccttggacctgaacctgccggccccgaacggaggaggatcaccaccaccaagcgcaccgccgccgggagaactcgaagttccaattcgccacaagtcaacagcccatcatactagcctcgcccgccttggtggattgccactactgaaaaaaaaagaaaagacgggttcacatgtcaatcaatgtaac

SEQ ID NO: 296 - DNA, 418 bp, Eucalyptus grandis
gcagtttcggatattaatttggtttccaatagcacacatagttcatacgaagatgggggaagcccacggagaattacatcagaaagtgaccctaaagatgctccaatgggaactgagagccttttaagtgcacctgaagcagtagagctttcagatacagggacttccttcacgttcaagatggattcatctatgcaaaggaaaccaccagtagatgaaagcccaaggatgcatccgttgcccatgaatctaactactgaagagggagataacaatgtttcgtgccaactaaatctatctcttgcatcttctctactgcaagttgaccacagtcaacaattcaatcgtttgaatgtgctaggttcagaaactagcaagtctccagatgcaaggtcaaatgccagcatcacagaatctg

SEQ ID NO: 297 - DNA, 250 bp, Eucalyptus grandis
tgcacccagagtataactcgagtccagtgggttacatggagaccaacaaggctcgtttggtgttggagaaggacgacttagggttgaatcttatgcctccttcgacttgttaaggttcttggcgatgattatgatatgatgatcagtttttcctgcattatttgaagaagctgaggctgaggtttcttgtcttttctttttcctttttgttatttttgaagaggttttcttttctctatttcccccccca

SEQ ID NO: 298 - DNA, 626 bp, Eucalyptus grandis
agaacataggtgcgaaggccgatgtgttccacatactctctggcatgtggaagacgcccgccgagaggtgtttcatgtggttgggcggtttccgttcatctgaacttctcaagatactagggaaccacctggagcctttgacggatcaacagttgatgggcatatgtaatctgcagcaatcttcacaacaggctgaagatgctttatctcagggaatggaagctctgcagcaatctctcgtggacacactttcttcgaccacactgagtcctactggttcaggcaacgtcgcagaatacatgggccaaatggctattgcgatgggaaagttggccactctcgaaaacttcgttcaccaggctgacctcttgagacagcagacgctccaacagatgcatcggatattaaccacccgccaagcagcccgcgctcttctcgtcatcaatgactacatctcacgtctccgagctctaagttcattatggttagctcgtcctaggactgaaaacatctgttctgctaaactcttctgatgtaatcgatagttttgattgaaattaacgtttctagtggggatccatttactgcgactgtagcgattcgggccacatttatataaaagctat

SEQ ID NO: 299 - DNA, 438 bp, Eucalyptus grandis
aaagaagagactaatggtcgcatctgcattcggagaggacgagaaagcgggtcgtcaaacccgcctaacggtggaggacttgaactacttgtttatggcgtgattcggaaggtctaattttgcggatcgcaacacatcatttactaaccttagtgctgcctggtagagtttgttctgagtagcggcagcggccttatacttagtgatttcgacagaagcgattggctggagattgatcaactttcctgcttcaccattatttgttactgtacagcgcgcgacagatagcaacatctaacagtaaagatgcaatttttttttcccctgaaaatgtaaatgatatagggtttttgttctatctctgtgctctcctccattccttatttgtatacggagatcacaaacttgaggtcagtgaatttgataattatgtcttgc

SEQ ID NO: 300 - DNA, 345 bp, Eucalyptus grandis
ctctcgttcgcgttctccgtctcatccttccttttgccggtgggtttccggtcgagatagcggagggttcctgattcagagggcggcggcggcagcgacgacgaggaggagctccgacctcgaagcgcttcggtccgattcctcccttgcggtcgcgcgtgtctgacggacgagtcgttttttggcgggagatgagagatctgtgcctcgaccagagagaaatggcgtcggggagctccagggtcgaggcccgagctgatgcggagatggcgctctacaacgagctctggcaagcctgcgctggtcctctcgtcgccgtccctcgtcaaggcgagcgtgtcttct

SEQ ID NO: 301 - DNA, 454 bp, Eucalyptus grandis
catattttcatgctgctacgccccgtcctttggcctgcatccatggccaatcagccacccggtgagccccaaccaaatccgccaccgccaccgccaccagccccagcgatccaaatccctgaccaaccaccgcataattcgccttcttcttcttcttcttcttcttcttcttcttcttcattggccaccaccggtgatcggggcggttcctcgcctagaccgatgctttctccgagcgggtcgtcgccgctggctcaatccacagggaggcacccgctttaccgtggagtccggtcccgcagcgggaagtgggtctccgagatccgcgagccccgcaagaccacccgcatttggcttgggacatacccgaatcccgagatggccgccgccgcctttgacgtggccgcgctggctctgaaaggctccgacgccgccctgaacttcccccatgatg

SEQ ID NO: 302 - DNA, 286 bp, Eucalyptus grandis
tttcccgcaagggcacatggaacagctggaggcatcgacaaatcaggaactgaatcagaggattccgctcttcaacctcacttccaaaattctttgccaggtcgtgaacgtccagctcctggcggagcaagaaacggatgaggtttatgcacagattactctaattccagcgggaaatctaatggagcctacaagtcccgatccagtctctgcggaaactccaagaacaagagttcatagtttctgcaaggttctaactgcctctgataccagcacacacggtggc

SEQ ID NO: 303 - DNA, 513 bp, Eucalyptus grandis
cagaggacaaggtaaaaaaggggcagccctctgctctgtctgaattgccgtctctccctacttctctgggcttctttttctttgcttcccttccttaaactctccctctccccgtttcttgtctggtttttctgggtgctctcgcttttcgctgctgaaggagtgagtttgaccgtcgggttcctttcttgatcctccaattcgatcgtcagctcctcgtgtcgacttttttcgggtttcctgtcggcactgttcgattcggattcctcgacggaatggggagtaacatcaacttcaagaacttcagcaccgatccgacgccgacgaataacaggcctcctggcaacacgctgttaacccggcaaccgtcggtgtacacgctgacctttgaggagttccagaactctataggcaaggactttgggtccatgaacatggatgagctcataaagaacatttggtctgcagaggagaaccaatctatggcatctgctagtggcgcttgtggtggcg

SEQ ID NO: 304 - DNA, 370 bp, Eucalyptus grandis
ggcgattgcatgcttcccatgtgtagcatggtgtcagatttttgaactgttaattgcatgtgccgcaatcttcattcctatcaattgagcacttcaacaggctttttctagtgggaagaagtctccaacaaacatgacataggggatattctggaaatagttatgaaagaggagaccccgtttctaataaggaacttccatgcaggcatgtggatcgtacgaatattctgagcaataccatgatgaagttaagccagcatatggacctcagatatcggcacattctcagtatctcgggtacaattccttgagattggggttgcctctcagagtggcggaggaacctgtttatgtgaatgccaagcagtac

SEQ ID NO: 305 - DNA, 503 bp, Eucalyptus grandis
gcccgatgtccccctcccctcccccgccggagacgtgaccgatgccgagtggttctacgtcatgtccttgacccgctctttctcggcgggagacggtattcccgggaaggccctcagcacggggtccttggtctggctgaccggtgctcgcgagcttgagtcgtacaagtgcgaccgggccaaggaggccgagctccatggcatccgcaccatggtttgcatcccgactggtgatggagtccttgaattggggtcttgcgatgtgatccctgaaaactggggccttgttcaacgagccaagtctcttttcggctccgatctgctccttcccaagcacccgccaccgccaccacctccgttccagctccaccatgaccatagcgacatttctttcgctgacattggaataattgcgggcgttcaagagaatgatttcgctcctcacgatgaccacgagaagaaggtcaagaagaagcagccgctggtggaaggagctggcggga

SEQ ID NO: 306 - DNA, 377 bp, Eucalyptus grandis
atgtcgctggaatgacgcgaggccgtcgtgacggcattctgaagagcgagaagacgcgacatgtcgtcaagattggccccatgcatttgaagggcgtgtggatcccttacgagcgggctctcgagtttgccaaccgggaaaagatcaccgagtatctctacccgctgtttgtgcatgacattggcgcgctgctctatcatccgagcaaccccagcggcgccaccagccgtgcgggcaacgcgcagaacacgcttgccgccatcgatcgtcgcaggaacgaggcgcgcatggcggcaagcatccaggggcaggcggtgagcggagtattggtctctcccgtcgcccagaccgcaggcggccgacccagcgtcgaccgc

SEQ ID NO: 307 - DNA, 361 bp, Eucalyptus grandis
aataatctctctctctatgacaatggagtgggtagtacaccacgccccaggtcaaatgctgaacagttaattttccgagcggcattgcaggatctctctcagccaaaatcagaagaaactccacctgacggtgctctggcagtacctcttttgaggcatcagaaaattgccttgtcatggatggtgaaaaaggaaaccgccataaattgctgtgggggaattcttgcggatgatcagggactagggaagacagtatcaactattgctcttatacttaaggaaagacctccaaccttcaaacaatgtcaggagaatccaaagcaggagttacaaacttttgatttggatgaggatgaaaatg

SEQ ID NO: 308 - DNA, 357 bp, Eucalyptus grandis
gccctctacctctccccctccctctctccctctacacctcgctctcgcttcatgatctgggtggacagagggtgttcccgcatagatccatcactcgctcgtgttacttcggcgcaaaaaaggctttgttttgggacctgggtttgtgtcgattggtcgtttttgtgaactcccgaatagtgatgtcgttgtcggccaagagcgagtcgattcaaattcgggacgtgtgggatgataacctcgacgaggaattcgcgcgaatccgcgagatcgtcgacgattatccgtacgtggccatggacaccgagttcccgggtatcgtcgtgcgccctgtgggcaacttcaagaactccagtg

SEQ ID NO: 309 - DNA, 433 bp, Eucalyptus grandis
ccgcggtcttctttcttccaaagtaaactcaacttcttccttcctccccaccggcaagaaaagtctccccgatcctctctcgccattcccggcctcgccgtccggctgaattgtcgacgttccggctcgctccggcgccgactggaggccatggcggattcggacaacgactcggggggccacaacaacgcgaacagcgagtcggcggcggcgctcgcccgcgagcaggaccggttcctcccgatcgcgaacgtcagccggatcatgaagaaggcgctccccgccaacgccaagatatccaaggaggccaaggagaccgtgcaggagtgcgtgtcggagttcataagcttcataacgggggaggcgtcggacggcagcagcagcatcggcggcggcggcgggggcgtcgtgaacagcggcgggggctccgcgg

SEQ ID NO: 310 - DNA, 511 bp, Eucalyptus grandis
ggaagatcaatccagatcgatgggagtttgtgaaccaaggttttcagaaagggaataagcacttgctgaagaatataaagaggagatgcaaattcagtgagcatagaaaaacatcgagtagtactgtcacctctgattaccagaaagctgaaaatgaagtggaactcaacacgcttaagaagggccaggaagtgttgaagaccagatcccttaaactaagagaagagcggaagagctttcagcatgagattgagcaagtcgcagagcgggttcgccatgctgagtgcaggaaccagcagatattcctcttcctcacaaaagcagccaaaagccccaactttgtccatcatttaatccagaagaagagccagaagagagatttagagacttgtgaatcaagcaagaagagcaaattgcttggttccgatgctgaagccaccaaattcttgaatgaagcaatggatcacatgattaaaagcccaaacgttgattgcctgagaatcagtgatga

SEQ ID NO: 311 - DNA, 799 bp, Eucalyptus grandis
ggaattcttgcagctgcagctcatgctgcggcgaacaacagccctttcactatattttacaatccgagggcaagtccttctgaattcgtgatccccttggctaagtacaataaagcattttatactcaagtttctcttggcatgagattcagaatgatgtttgagaccgaggagtcgggagtccgaagatacatgggtacaatcactggaattagtgatttggattctgtgagatggaaaaactcccagtggcgcaatctccaggtggggtgggacgagtcgacagccggtgaacgaccaagcagagtttcaatgtgggaaatagagcctgttgtaactcctttttacatatgtccacctcctttttttcggcccaagtttcctaggcaacctgatgatgagtctgatgtagaaaatgctttcaagagggccatgccttggcttggagatgagtttggcatcaaggacacgcctaactcaatcttccctggcttgagtttgatgcagtggatgagcatgcagcagagtaatccacttcaagccactcaatctggacttctacctccaatgctttcttccactggtttacacaataaccttggcatcgacgacccctccaaattgctaagtttccaagcccccacccaaggtcttcaatttaataaaacgaatccacaaaatcaagtcagtcaattgctgcaaccgtctatggcttggtctcaacagcaccagcttcagcaactgttgcagaatcctctgggccaccagcagcagcagcagcagcagcagctgcagcgcc

SEQ ID NO: 312 - DNA, 304 bp, Eucalyptus grandis
gtaccttccatgaaaccagaatatccggttccaaatggaattggagcatcggactttggggaatctttcaggttccagaaggtcttgcaaggtcaagaaaacttgggttttggcactccttacgatggtatcgaaactcaaagtcatcggctatctgaagtgaggaggcatcatcctgatgattcaggtggttctgaagctgctgccaccagaaatggcatcacaaacccatccgtgaatgctagtgtcacttacaaaggcatgggctttggcgaatctttccggtttcgtgaggtcttgcaag

SEQ ID NO: 313 - DNA, 427 bp, Eucalyptus grandis
cccccctctccccttctgcctccgccctcgatccccaaaaccctcctccgaatcgattccggcagccccctccggccaccgccccctcccgccgcaatggacgcagcgccgccgggcggcggcggaggcggaggcggcccggcgccgttcctcctgaagacctacgagatggtggacgacgcggggacggacgagatcgtggcgtggagctccggcaagacgagcttcgtcgtctggaacccgcccgagttcgcccgcctcctgctccccacctatttcaagcacaacaacttctccagcttcatccggcagctcaacacctacggattccgaaaaattgatcctgagcgatgggagtttgctaatgaagaatttgtgaaggacaaaaaacatcttctcaaaaacatccaccgtagaaagcccatcc

SEQ ID NO: 314 - DNA, 308 bp, Eucalyptus grandis
ttcaagatgtaaagggaaaggaagtgggtgtttcagttcagattttggcccaataataacagcagaatgtacgtgttggagggtgtaactccttgcatacaatctatgcagttacaagctggagacactgtaacttttagccgcatggaccctgaagcgaaacttataatgggtttccggaaagcatcaacctctatgatgcaggacagccaactagctgctgtttctaacggtaaccattcaagtgaagctttgatttctggtggttttgaaaatgtacctatgataagtgggtattcgagtctcct

SEQ ID NO: 315 - DNA, 92 bp, Eucalyptus grandis
agaactggaaaggctgaatcagagtgtctttgtccccgtaatagtgggctgctggatgcgttagttcacgagtcgaagactatgagcagtgc

SEQ ID NO: 316 - DNA, 764 bp, Eucalyptus grandis
agagagacgaccggacggtggaaaagagagagagagagagagagagagagagagaagattgcgatgtagccggcgacgatcctagaatctgaagctgccgagcctaggccgtcgattttcttaagcccgttcttggtgctgctgttgccgttgctgttggtggtggtggtgctgctgctgctgcagtgattgcttcttccagctttttctgtggcggaatagagctgcagctcgtcgggggctcgtctgctcccgctgttcccttcccctccccgtctcctgagtagggttgcggaagttttccggcggtccgtctgcgcaccaccgatcgacgaggaggcgcgctccgtcttcggattcgggacgccggggatatggcttctcacgaggtctccgtcgtggggagcgaccggagggagagggagaggacgggctgcgaggacgccttgtacaaggagctgtggcacgcttgcgccggtcctctggtgacggttcctcgcgaaggggagctggtttattacttcccgcagggcatatcgagcagattgaggcgtcgatgaatcaagtcgccgatcggcagataccgttttacaatcttccctcaaagattctctgccgtgtcattaatgttcaattgagggctgaaccagagaccgatgagctgtttgctcaagtgactttgcttccggtgcctaaccaagatgagactgctgtggagaaggaaactgggatcccctgcctccaacgaccccgtgtccattcct

SEQ ID NO: 317 - DNA, 181 bp, Eucalyptus grandis
acattcatggggatatgcagcctccaacattcatctcagcaggcggaggaggcgctgtcccaggggctagaacagctccaacagtcactcgtcgacaccattgccggcgggcccagcatcgaaggaatgcaacagatggcaatcgccttgggcaaattaaccaatctcgaaggctttgttc

SEQ ID NO: 318 - DNA, 420 bp, Eucalyptus grandis
ctattggttatcccaagatgccgttacaggcttcaatttctacacagtcggacttccaagctgatggttctggtcatggtgtgccaataccacaaggtgcagatagtggatcattaggcatttcagccttacccaccatacaaagagattcgggtgtgcatgttaagcaaacaacaagtgagtcatcgagggaggattcagatgatgaagaatttgaaggtgacacgggaaccactgaaaacaaagatcctgctgaagtcagacgcgccagaaggatgcagtcaaatcgggagtcagctaggcgatccagaagaagaaaacaggagcacatgagtgaacttgaaaaccaggttgagcacactggactactgaagcgtctcactgatatgaaccaaaagtatgatgtagcatcagttgaca

SEQ ID NO: 319 - DNA, 462 bp, Eucalyptus grandis
cggaaccggtggcaattggatcgctcttcctcgcaaagccgggcttaagcgctgcggcaagagttgcaggctaaggtggctgaattacctgaggccagacataaagcatggaggtttcactgaggaggaggatcacgtcatctgcactcttttctttaccataggaagcaggtggtcggtaattgcttccaaattgccaggaaggacagataatgatgtgaagaactactggaacaccaagctgaagaagaagctaatgaagcaactggcttctctgaaaacagtgcctgaaagtaactttgactatcaggtctgcgcacagaactcggcctcaatcgatcctgagaccaagaatcgggaatatgctgctaattcaatgggattccccaagcagaacttcaatccaggaatacccacttcgaactcgagtcttctctgtcctccaagtctcactgaagtttc

SEQ ID NO: 320 - DNA, 445 bp, Eucalyptus grandis
gcacttcttgcgcagacaattgcagactctctctctctctcattcaggcgcctgtcttctcaagcattttgtcaaagaaactcctttgttttttctctctttctctctcgaccatggcccgaccgcagcagcgatatcgcggcgtgcgccagaggcattggggctcctgggtctctgaaattcgccacccgttattgaaaacaagaatttggctagggacgtttgaaacggccgaggatgcggctcgagcctatgacgaggcggcaaggctaatgtgcgggccgagggctcggaccaacttcccttacaacccaaacatgtctcagtctcttcgtcgaagctcctctcggcgacattgacagcaaagctccacaggtgctacatggcctcgttgcagatgaccaagtctgcattgcaagtgcaagaaccacagaaccacccagtt

SEQ ID NO: 321 - DNA, 350 bp, Eucalyptus grandis
cgcgagccgcatcccgcccctccttccttccccgttctcgaattcgccgagatctgctgcggatcgcaccggcgcgggattctcgatggaggcggcggcggcggcggcgaaggtggtgggggaggcggaggagctccccaagaccatcgtgcggcgcgttgtgaaggagaagctctcccggtgctccgacgacggcgacgtctccctccacaaggacgccctcctcgccttctccgagagcgcccgcatcttcatccactacctctccgccacagcgaacgacatatgcaaagaatcgaagaggcaaactatcaacgcggatgacgtgttgaaggcgctggaggagatgg

SEQ ID NO: 322 - DNA, 263 bp, Eucalyptus grandis
tggcgatagccagttcatgagcaaggccagcttcgtggtgttgataggttggagggtagtcactgggtaccaattgggtgggaaaggatctcggctctcgcccaaactgtgcaagtagatgctggttgggggatgcagctagattcaatggatgacgatgaggacctgactgttgcagatatggagactccttactgggagaggcctgcagggccgatatggtggtgtcatttctcggcaggtcatcctgctgtggaagcatg

SEQ ID NO: 323 - DNA, 893 bp, Eucalyptus grandis
gttttttcccttttcgatatctctgcaaatctgcgactctctgctctcggctccaaccccctcctcttcactcttcttcacaatccctgtctcgcgaatttatggcgctacccgcacgacagtccgtcccttcctttgatcactagcaaatgtacgaccgaggattagcaacccaaaagctgtcgaattccatctgatttggtgcctctcatggtgtgaaaagcagaactgttctctcgtattcttggcatcagtacaactggctcaacatgctgttactcttactcaactaaaacttcagcaccacattgtcgttggccttaaagttacagctcagtaatgaaaccaaccattgatctggaagtggaggccgtctcggaaaatgactctgagattagtagccaagtcgcctccaatctatccaatcaagagccctccatgggtccctccaatgacagccttgctaactcttcctacctcatcagcccttcggctgttggatcaggttccgaaactgtgttcctagacttgagccttggttgcagcaatgatgagtccagcgggagggattctgtaggagtcgccttctcgagcaccagcgaatgtagcaatgagcccgaatctcatccggcagctgcaggaccaaccacttcaagagtcttttcttgcaattactgtcaaaggaagtttttcagctcacaggcactcggtggccatcagaacgcgcacaagagagagaggaccctggcaaagcgggcaatgaggatgggcatgttttcttcacagagatattccagcttggcgtctttgcctttgcacgggtctcccactgtcagggatctggggatcaaagcgcattcttccgtgcaccaggtgcaccaaggcatgttgca

SEQ ID NO: 324 - DNA, 434 bp, Eucalyptus grandis
atcacttcaacaccatgaccttacaaaaacaaagcaattgttagaaccatggttgctcaactgaagaacttcgatgctgcgctacaagaattggaggagaagaagaagaacgaagtcgaccctagctcgagcatcggttcgtggatgtggaaccctagtgccgcccaggaggatgatgactcgtgggaggtgagagccttcgccgaagacactagcaacattatgggcgcaacctggccgccgaggtcctacacttgctctttctgtagaagggagttccggtccgcccaagccctcggcggccacatgaatgtccaccgcagagaccgtgctaagcttcaccaatcacaattccggccgctggcgaaccaaaattctcctttcgcttcttgctcttccccgtcctcctcgactctgctattcccgaatcaaga

SEQ ID NO: 325 - DNA, 588 bp, Eucalyptus grandis
cctagctgaaactattactcccactggttctctctctctctctctctctctctctcaaacatggctgaattagattattgccaaaccaaaagcagccccggcgctgccgccacgcgcttaaagctcttcggcttcaacgtctccgatgaggaagactcagccgtcagcgaccccattactgttggcgcgaacggcggcggcggcggcggaggcggcaaggccacgccgtcgggctcgccggaaggcagcgtcccggtggggggcggcggcgagcggaagtacgagtgccagtactgctgcagggaattcgccaactcgcaggccctggggggccaccagaacgcgcacaagaaggagaggcagcagctcaagcgcgcccagctgcacgccagccggaacgccgccgtgtcgtcgctcgtccggaaccccatcatctcggccttcgctacgccgccgcacctgctggccaccgtggggccggtggtggtgacgggggcggcgcccacctccccgtcctgggtttacgttccgcgtggcgccccgcccttccaagtgtcgcacggctgcgtgttcacgaccggccaggga

SEQ ID NO: 326 - DNA, 417 bp, Eucalyptus grandis
ggaacatcaatcgaatccatggcatcagagctcctcagccgctaatcacaggcagctcaacctagagctcgcacttgagccatgttcaccatcctcgtcatcatcaccagcatcactccatcctcttgcagttcctgcaaaagacaacaagctttactcatgcaacttctgccaaaagaagttctatagctcgcaagcacttgggggtcaccagaatgctcacaagctcgagcgaaccctagcgaagaagagcagggacttgtgctctgccgcaaaacctcctgcggcgacctcgaatggtcaccatgtacggccatcttttcaatctgtggtttatgagaatcagccacgcttggccaggcatgttggggatgatatgaggtatgctgggactaatccgctgtatggttcatcttg

SEQ ID NO: 327 - DNA, 448 bp, Eucalyptus grandis
cagctgtcgtcggtggacagggaagcgagggtcctgaggtacagggagaagaggaagaaccgcaagttcgagaagaccatcaggtacgcctcgcggaaggcctacgccgaaacccggccccggatcaagggcaggttcgcgaagcgcgccgacatcgaggcggaggccgagcgcatgttcgggttcggggtcgtgccctccttctgatgtcatctgaagcgttggaaggtctctctctctctctctctcaagagagaaattttgggctcttttccttgctggttttgtgctgctgcttttctcttgcagcgatatcagtctgttttgtatatacagtaggagactgttgtgtgctccctggatctctgaccgttgcctgatcttgaatgttttatggtgaattttcatggaatttgatgatgcaaattgaagggaaatttgctgaaaa

SEQ ID NO: 328 - DNA, 673 bp, Eucalyptus grandis
gagaggtccgtggacggtggaggaggacctcaccctcgtcaattacattgccaaccacggcgaaggacgctggaactccctcgcccgcagcgcaggtttgaaacggaccggaaagagttgccggctgcggtggctgaattacctccgccccgacgttcggcgcgggaacataaccctcgaagagcagctcttgatcctcgagctccattcccgctggggcaatcgatggtcgaagatcgcgcaacacttgccgggcaggaccgacaacgagatcaagaactactggcgaacccgggtgcagaagcacgcgaagcagctcaaatgtgacgtcaacagcaagcagttcaaggacgccatgaaatacctctggatgccgaggctggtcgagaggatccaagccgcctccgcctctgtctcgaccgctactgtcgccgccgccgccatggcagccccacccacaatggccaccaccgcagcatccaacatcggcggcatggctttcccgccggccctggcgggcatgggcggcgacttcaggggcgggcgagtgaatgtggcgcccagctacagcaccccggagaactcctgcacgacggcgtcttccgactcattcggtgcgcaggtctcacccgtctcggaccttaccgaccttgaccgagtacttaccctatcc

SEQ ID NO: 329 - DNA, 1008 bp, Eucalyptus grandis
gttccaagttcactcccttcctcaagctacgattccagctctccggaaggaggaagaacgtcgcgaaattcaccggaatctctccgacccatcaacgctcgggaaggaaaggcgcgacctttgatccgccttttttttgtaccgtccgatgagtctctgggcggactacgaccacgccgccgcgaccgacctctccgccttctggccgccgccggccaccccccctccgccggcgccggcgccgccgctcagtcaggagtcgctgcagcggcggctccaggccctgatcgagggggctcgcgggagggacggggaagaaggggccggggggcccgccgcggcgtggacctacaccatcttctggcagtcctccggcgactactccggccccgtcctcgggtggggggatgggtattacaagggcgacggcagagccaggagcaggggctccgcttgctctcaggccgagcaggagcaccggaagaaggtcctccgcgagctcaattcgctgatttccggggccccgcccgccgacgacgcggtcgaggaggaagtgaccgacaccgagtggttcttcctggtctccatgacccagtcgttcgccggcggcgtcgggttgcccggtcgggcctacttcagctcgaatcccgcgtgggtcacgggggccgagaggttggggaattgcgggtgcgatagggcccggcaggcgcagatcttcgggttgcagaccatcgcgtgcgtccctgttttgaacggtgtggtcgaactgggttccaccgagccgatctaccagagctccgatctgattagcggaattagggggctgttcaatttccatgaatcggagatgggatgcggtggtagggttttgaatagcgagcatgacccggcgtcgctttggatctgcgatccgccagtcacgatggagattaacgatcgtcctatgacatttcagatagagaaccccagctcgagcagtcttaccgaaagccccagcgcgatctgcgc

SEQ ID NO: 330 - DNA, 384 bp, Eucalyptus grandis
caaaccccaccctgataagttcccagcaacatagagacactcacagaaacactcgcaaaaaacctctttgctgtcttccatggttccgccattcccgactgcagaactgcctctcaacgagaatgattcgcaagacatggtcatctaccatgtactgaacgaggccatgtcccagaacaactcctccctcccgcatccgaaccaatctgggtccccatcgagcggcggttccctcgagccgtccaggggcatcacgaagaagcactacagaggagtccggcggcgcccgtgggggaagttcgcggtgagattcgcgactcgttacgccacggggcccgagtttggctcgggacattcgagacagccgaggaggcggcgctggct

SEQ ID NO: 331 - DNA, 420 bp, Eucalyptus grandis; identical to SEQ ID NO: 318

SEQ ID NO: 332 - DNA, 1439 bp, Pinus radiata
gcaacctgaagcgttttaggcggtgaggtggaagaagggggacaagggagaacctgaagatttgtttgaattaagctgtcatcgggcagggcaagcaggtcttcatatctctgcaatatatatctatatgcggcagaccttgtttaggcaatctattgtttcgggtataagtagggaagtttccccattctgtaggattcttaaacgcatttctagggccacggaatgcgtcaaattgcacatacccacgcctcctttctcataacaggtttacgcgcgatttcttcccttctagaaggcctcttcctcctttactaaatcgggtgttgtttcatcagttttctccacaaaatccctgaagttctcttaattttttcgagggtcggttttttatagtgttatctacggttaatatcagcgaagggcctttagatccgaaggtataatggggcagcaatctctgatatacagttttgttgcgaggggcaccgtggtgcttgcggagtacacggaattcaaaggcaattttacaggtattgccgctcagtgtctgcaaaagcttcccgccagcaacaacaagttcacatacaattgcgataatcataccttcaactaccttgttgaagatggcttcgcatattgtgttgttgcagatgaatccgttggaaggcaagtaccaatggcatttctggagcgtgttaaggaggattttaagaggagatatggtggtggaagagctgacacagctgttgctaacagcttgaacagagattttgggtcaaaattgaaagagcacatgcagtattgcattgaccaccctgaagagatcagcaaacttgcaaaagtcaaggcccaggtttctgaagtgaaaggtgtcatgatggacaacattgaaaaggttcttgaccgtggtgagaagattgaacttctggttgataaaacagaaaaccttcgttttcaggctcaagacttccaaaagaagggaaccgagttgcgcagaaagatgtggtttcagaacatgaaagtgaaattgattgtccttggaattgtggtggccttgattctcataattgtcctttcagtatgccatggattcaattgttcgaaaaaatgatctggaatagatagaggtccatttgaattggaacaacttttgattggctatggatggcattcttgttctcctttgtatttctctctatattatcagtttcgggtgagatagttctatgatgtttgccagagggtattttgcttggacaatcactggttgatagtacatattgactagtatgacaacgaaatgttctgaatattcagtggggcagagactctgattgcgtacagcaactttagtgtattatatcaaggtcatgcatttgttattgttcttatctttaatgaagtattgttttacatcttagaaaaaaaaaaaaaaa

SEQ ID NO: 333 - DNA, 407 bp, Pinus radiata
atttaactgggattgcaagctgcttgtgttgtttctgtgcttcaagcgaagggaagggaagacattcctagagaagaaaaaaatcaatatcaatggggagggggaagattgaaataaaaatgattgaaaatacagcaaacaggcaagtcacattctctaagagaaaaggaggacttcttaagaaagctcacgagctctccgttttatgcaatgcagaaattgctctcatcgttttttccaacactggcaaactccatgattggtcaagctccagcatgaaaaaagttatggagaagtaccagaaatcggatcaaggactaggacttatggactaccaacaacaacagctgttgtgtgaaatgaaacgaatcaccaaagaaaatgaaagccttcgagctcgtttaagg

SEQ ID NO: 334 - DNA, 307 bp, Pinus radiata
gtaccgtctccactggtgcctacccgagaaaattacttcgtgagatattgtaaacaacattcagatggaatatgggcggtggtggacgtctctcttgacacgttgcgtgggaacccgcaaccccatcccaactgccctccttcgactttaagatgccgaagacgaccgtccggttgccttatccaggagatgcccaatggctattccaaggttacgtgggttgaacatgttgaagtggacgagagggctgtgcaccgtatttatgataagttggtaagcaccgtttcgcgccgaacgccataccgct

SEQ ID NO: 335 - DNA, 530 bp, Pinus radiata
ctttccaatattgagcccaagcaaatcaaagtttggtttcagaatcgaaggtgccgagagaagcagaggaaggaagcctcgaggcttcagactgttaacaggaagctgacggcaatgaacaagttgctcatggaggagaacgatcgccttcagaagcaagtttcacagttggtgtatgagaatggttacatgagacagcagctacagaatgcatctgtggccgccacagacacaagctgtgagtctgtggtgactagtggtcagcaccaacataatccaacacctcagcatcccccaagagatgctagccccgctggactcctgtctatagcagaggagaccttgacagagttcctttcaaaggctaaaggagctgctgtcgattgggtccagatgcctgggatgaagcctggtccggattcgattggtattgtagctatttcaaatacttgtaatggagtagctgcacgtgcttgcggtcttgtaggattagatcctacaaaggttgcagagatccttaaagatcgccc

SEQ ID NO: 336 - DNA, 402 bp, Pinus radiata
cattcttccagagggaccacctgagagccgatcagtaattgacaatcgacaggtcgaaggatcgatcctgaccattgcatttcagatacttgttaacgatctcccatcggcaaagctgacgctggagtctgttgagactgtcaacaatctcatttcatgcactgcacagagaatcaaagctgctctacataaagtcgaggatgtttgatgttcagagatcggtcgcaagctaacttaaatatgtcttcaattatttttttttaccaaaacaataaatattatttatgagtgttgaacaacaccattctcgagttttgggattgtatattatcagtttgaaagtgtgagtgcaatttgataaccgactatagggatggaaggaaaactgcatcgaaatccaca

SEQ ID NO: 337 - DNA, 356 bp, Pinus radiata
attttttctgtagatggtgtgaggacgtgctgaatagttcctaaatcgtttcttccgcgtttggtcatcgaacgagttcctataactcgccaagaccaggttcttcacggactactaattttgggcttctacacatctttcccggaagtagatggggcgggcactaggaagaacagaaataaagaggatagaaaatgaagtgagcaggaatgtgagttttagaaagagacgacgtggattgctgaagaaggctgcggagttgtcaatactttgcgatgcaacagtgggcgttgttgttttctctccggccgggaaactttctgaatatgccagcacttcggagtcaaatggatacg

SEQ ID NO: 338 - DNA, 380 bp, Pinus radiata
attcgaaaccctaccaatcggcactcatccttctacaaacgcaagggcggtttgcttaaaaaagcatttgaacttgctgttctctgtgatgctgaagttgctctgataatcttctctgaaaccggcaggatttacgagtttgcaagccacgatgatgtgaccacagtattggcaaaataccgaatacaaacgaaaactgccggaaacgcaatgccttcatcgcttcaaaaaacagagtttgatcaattacaagtcaggatgttgcaggagaagatagacaatttggagaaaacgaaaaagcatatggtcggtgagaatttggagtcactgacgtggaaggaattgcaacaagtcgaaaagaaattaagcaaggctacaaa

SEQ ID NO: 339 - DNA, 299 bp, Pinus radiata
cctacttggaaaggcaaatccttgtaactgttccatcctgcacgaattggaggttttggaggtggccaggtcatcctcccattagcccatactgtggaacatgaagagtttttggaggttatcaagttggagaatcatggcctgacacaggaagaagctttgctatcgagggatatgtttctgttgcagctttgtagtgggctcgatgaaaatgcagttggggcctgtgctgaacttgtctttgctccaattgatgcatccttagctgacagttctcctttgctcccttctggtttcag

SEQ ID NO: 340 - DNA, 584 bp, Pinus radiata
tcgcagcgtaaagcgttcatgggtgccgggcgggtaactcttgaaaaatattagattcgactccctgaccctgggaggaggaagaagaagaagaacagcaggaggaagcgaaaatttcttaatagtaaccagagaatagcagcgggtgaagaagcagagggatcttgcaatggggcggggtcgggttcagctgaggcgaatagaaaacaaaataaatcgacaagtcacgttttcgaagcgccggaacggactgctgaagaaggcgtacgagctatcagtgctgtgcgatgccgaagtggcgctaataattttctctaccagaggaaagctttacgagtttgccagttccagcatgaacaagacgttggaaagatacgaaaaatgttcatatgcaatgcaagataccacaggcgtttcggaccgggaagcacagaattggcaccaagaagttacaaagttgaagggtaaggttgagctcctgcagcgatcacaaaggcatttgttgggggaagatctgggtccgttaaatgttaaggagctacagcagcttgaacgtcagctggaggttgctctgacacatctta

SEQ ID NO: 341 - DNA, 592 bp, Pinus radiata
ttgggttcggggtcctgtcctgactggaatttttgtttcactcgttctgccccgtctggattgggctgcactgaaatacattgaacattggagttgtcgagcgcgagatatgggtcagcagtccctcatttacagctttgttgcaaggggcacggtggtcttggccgagtacacccaattcacgggcaatttcacaacaattgccaatcaatgccttcagaagattcctgccagcaataataagttcacctacaattgcgatcgtcacacattcaattatctcgtcgaagatggttacacatactgtgttgttgcagatgaatcagttggaagacaactaccaattgcctttctggagcgcattaaggatgacttcaagaaacgatatggtggtggaaaagctgacacagctgttgctcacagcctcaacaaagactttggaccaaaattgaaagatcatatgcagtattgtgttgatcacccagaagagattaacaaacttgcaaaagtgaaggctcaggtttctgaagttaaaggcgtaatgatggagaatattgagaaggtccttgatcggggtgaaaagatagaactt

SEQ ID NO: 342 - DNA, 163 bp, Pinus radiata
gtttcctactggaaatggtggaacaatcgagcttttatacatgcatacatatgcggccactactttagcttctgctagagacttctggactctgagatacacaacagtgttggaatatggtagtcttgtggtttgtgaaaggtccttgagtgggactcagggt

SEQ ID NO: 343 - DNA, 372 bp, Pinus radiata
gaggagggaggcctgctgccctcagccgtccttaatggcgagagctcctcaccaccaccagcaacagcaacaccaccagcaccaccaacaagaagccagcaggatggtgacttccttggaggtcgatatcgatactgcttgttccagtaaacctaacgattccattgatgcgctgaaatcaaaaattgcttgccatcctcactatcctcagctgttggcagcttacatggattgccagaaggttggggctcctccagaagttgtcacagtactggatgagattattcaagagaatcagcttggacgccattcgggaactatggatataggagtggatccggagcttgatcaattcatggaggcctactgcca

SEQ ID NO: 344 - DNA, 418 bp, Pinus radiata
gtagattccttgtctatcaagagggtgcacaaggtttgtttttaagaacacagacaggcagacagacagagacgtgatcatggggcgagggaagattgaaataaagaaaatagatgatgtaacgagcagacaggtaactttctcaaagcgcaagatggggatattcaagaaagcccacgagctgtctgttttatgcgatgcagaggtggctgttctcatcttttcaaacaccggaaggctctacgactatgctagttcaaggtgtatggaacgaactattgagagatatgaaaaatgtaccaaagcaattaattgcccaacatcagatcccattgtcgagaataagagcccaattcaggaaggcattgaaatattgaggcagaaacttcgtgcattacaaagattgcaaagaaatctg

SEQ ID NO: 345 - DNA, 657 bp, Pinus radiata
ggtacaagaagtggctcatattgcaaatgggtcgcacccgggaaattgtatttctcttcttcgcgtaaatgcatgtagtacaagccaaaacgtagagctaatactgcaggagagttgcacagatgcatctgggtctgttatagtgtacgcccccgtggacgtcccagcaatcaatattgctatgagcggggaggatccttcatacatagcccttctcccctctggatttgccattcttccagacggtcaaaatagatcttctactagttcactcctcgaaggggcgaacagcagcagcaacagtagcaacagcagtggattggatagcccgctcacaagaggaggttcattactcactgtggcctttcaggtgcttgtcagccatttaccaacagccaagctgggtttagattctgttacaaccatcaataatctcatatgcaatacagtgcagcagataaaatctgcattgcactgtgcagatgtctgaatcgcagtgtaattatcggagtacgggtggagggggcggcatgcagagaaacaacataaaaaacgttctatccggtacttgcacccccaagggtagtagaataaaaaatgatatgcatatatatgtttggtggttgctttctgtagttttatctgctgcagttaagt

SEQ ID NO: 346 - DNA, 377 bp, Pinus radiata
aaccggagagcaagaacaaagtggaaacgcaacgaagtggagtgcgataatctgaaacggtgttgcgagagtctgagggaggagaacagaagattggagaaagaagtgcagtcgctgagagccatgaaagtcccgcagtcacccaattcgatgcctctggcagccgccaccctcgcaatgtgtccggcctgcgagggccttgcaatcaagaaccgcggcgccgccacttcctccaccgcgaagtcacaacaatccctccttacaattatggggattggggatgtaaatatgatatccaaaaataaccaaaccccttcaatgggaatgggagatgaaatgaattgaagaaagtgaacttaaaaaaaaaaaaaaaaaaa

SEQ ID NO: 347 - DNA, 558 bp, Pinus radiata
gaaagaaggaaagaatggggcgagggcgcgtcgagctgaagcggatcgagaataagattaaccgtcaggtcacgttttcgaaacgccggaatggtctgctgaaaaaggcgtatgaactttcagtgttatgtgatgcagaggtagcacttgataatattctcaagcagaggaaaactctatgagttcggaagcgccgggatgctcaagactctggagcgatatcaaaaatgttcatacgtattgcaagacgcgactgtatcggaccgggaggcgcagaattggcatcaagaggttggcaaattaaaagccaaagttgaacttttacaacgatcacaaaggcacttattaggtgaagacctgggccccttgagtattaaggagctgcaacaactggaacgtcaacttgaggttgcactgacacatgttaggtcaagaaagactcaagtcatgttggaaatgatggatgaactacgcagaaaggagcgaattttacaagaagtaaacaaatctctgcgcaagaagttgcaggaggccgagggacaggcattcaatgccatg

SEQ ID NO: 348 - DNA, 331 bp, Pinus radiata
ctcagatacagctaatagcagtgagcttctgggcagcagcagatcagatggagatcacccacatcatggccaccatgatcagcagcagcagcagcaggagaatcatatggtgtggcagaattcaaggctcaaggcagatgttctccaacatccactgtatgaccagttgttggctgctcatgttgcctgcttgaggattgcaactcctgtggatcagcttccaaaaatagatgctcagttggctcagcagcaccatgttgtggccaagtactcagtcctaggaaggaaccagctcttgactggagaggagaaggaggagcttgacaggttc

SEQ ID NO: 349 - DNA, 260 bp, Pinus radiata
acgaaattaccttggggagtatactggagagttgatttcacatcgggaagctgataagcgaggaaagatttatgatcgagaagactcctccttccttttcaacttgaacgatcagtatgttcttgatgcataccggaagggggataagttgaaatttgcaaatcattcaccaactccaaattgctatgcaaaggtgattatggttgctggtgatcatagagtgggtatttttgcaaaggaacgcattgcagccggtgagg

SEQ ID NO: 350 - DNA, 479 bp, Pinus radiata
aaaatttaacagaaacattgcaagctgcttgtttaatttctgtgcttcaagggaaaggagaggaagagattcccagaggagaagatcaagataaatggggagggggaagattgaaataaaaatgattgagaacgcaacaaacaggcaagtcaccttctctaagagaagagggggacttaaaaagaaagctcaggagctctccgtcttatgcaatgcagaagttgctctcatcattttttccagcaccggcaaactccatgagtggtcaagctcgagctcattctttatgttacaaaaaagcatgaagaaaattctcgagagataccagaaatcagagcagggactaggactcatggattatcaacatcaacagctgttgtgtgaaatgagacgaatcaccaaagaaaatgaaagccttcaagagcgtttaaggcatatgaatggcgaggaagtcaattcattgaagctcccagagcttt

SEQ ID NO: 351 - DNA, 260 bp, Pinus radiata
gctatttgcagcatttccttccatccgtacccaaaagatgctgacaaacatttactagcaagacagactggactgaccagaagccaggtttcaaattggtttataaatgcacgtgtccgcctttggaaacccatggtggaagaaatgtatatggaggaacttagagaggccgaaacacagaatcatgcagcagattcgaaggtaacaacagaaagtggtcaaaacaatgaagaaacggtgtcaaaggaaggagctgggaa

SEQ ID NO: 352 - DNA, 176 bp, Pinus radiata
agggggctggttacagctctgtgagcggaatagatgaacatgcagctggattctgttctcaacttgtgtttgcaccaattgatgcatcttttgctgatgatgctcctctggctgccctctggtttccgagtaattcctctagaatctggatcagaatgtttctcctccaaaacgga

SEQ ID NO: 353 - DNA, 338 bp, Pinus radiata
ggacggaggaggacgaggagctggtcatttcgtcatggaacagtttatacctgagcaggccgtcatctctgattcgtccatatcttcggtgaaaacagaagtttgcagcggtagtggaggccaatttgagctgatccgcaggaaagaagaggggagatgcggccgtgcctatgctgagccttcatttgttgtcactcctctagttacttcattacctccacagcagcaggaaggccggatggtaacatccctggcagtggatatggacagctcatgttcttgtaaaccaaatgaagctgatgccatgagagcaaaattatttgcgcatgtacactatc

SEQ ID NO: 354 - DNA, 405 bp, Pinus radiata
gggcaaggggaaagacacagatgagaaagatcgagagcgcgaccagcaggcaggttacgttttctaagcgcagaaatggattgatgaagaaagcttacgagctgtcggtgctctgcgatgcccaactgggactgattgttttctcccccagagggaaggtctatgaattctccagtacctgcatgcagaaaatgttggcacgatacgaaaaatgttcagaaggaagtgacacgagtacatcaaaagagcaagatgtccagtgtttaaaacgagaaagtgcgaatatggaagaaaggattgaaattcttgaatccatgcaaagaaagatgttgggcgaggagctggcatcatgtgcattgaaggatttgaatcagttggagagccaggttgaacgaggtttgagaa

SEQ ID NO: 355 - DNA, 332 bp, Pinus radiata
tctctctggtgtggggagcactcaaaatggggaagacgaagatggagattaaacgcattcaaaaccctagccgccgccaggttactttctcgaaacgcaagaacggattgctaaaaaaggcattcgagctttctgttctctgcgatgctgaagtcgccctgatcattttctcggaaactggcaagatctgcgagtttgcaagccacgacgacatggcaacaatactggaaaaatatcgaatatacacggaaacacatggaaacatggagtcctcgtcggtccaaagcgtgaagattggtgaatcacaactcaaagcgttgcgtgagaagatg

SEQ ID NO: 356 - DNA, 405 bp, Pinus radiata
aaactccccaaggaagcaaggcaaaagttgttggattggtggaccagaaactataagtggccatatccttcggaaagtcaaaagatagcattggcagaatctaccgggctggatcagaagcaaataaataactggtttataaatcagcgcaagcgacattggaaaccatctgaagagatgcagttcgtggttatggatagtcctaatcctcacaacgctgcttttttcctggagggacatctcaggacagatggaactgccttttcaatggattgttgaagttaaacccatttttgaggcaaacaccagttttagtgcaatgctgtagatttgtctgactcatcttttatatgtatagctggatctctaaaatgggccatgtttcataacgtgctagatatgagt

SEQ ID NO: 357 - DNA, 468 bp, Pinus radiata
acttttcatgcgtttcgaaggccgccatgattctggcagagcacagcgaaggcgatgcagagctggaggaagtagcaggggaatgtttagagagggttccgcctttacacagccgattcacgcataccacaaaaagaaaaatgtacagttttctaatggacggcccatttgtttactgtgccatagtggatgaagcgctcgggaaaccgcaggtctttgtatttctcgagcatgtcagagatgagttcaagaaattgttgaagaacagaggttgtgaagggctcagttcgtgctgttttgataaagaattcggtcctgtttacaagcgccttgtggctcctcttgtgggtgttcctcaaatagaaaaggatcgcttgatggaggaagaatcgaaatcccaacctgctaaaacacatccagtccaggtaaataattctcccaaagattctctacctgtgtatgataata

SEQ ID NO: 358 - DNA, 499 bp, Pinus radiata
aagatgggagcttggtgatctgtgaaagatctctctctgcggctcaaggtatgcctatggtatcacagtctcaaagctttgtgcatggtgaactcttatctagtgggtatttgatccgaccctgtgaaggcagaggagcattagtcatcatggttgatcacaggaacttagaggcttcaagtgtccctgaagcacttcgtcccttatatgagtcatctacattctttgcacagaagatgacagttgaggcttcttatcatcttcaaggtaaagttcaaccggaaatgatttccttatcaaaaaaactccaacagccatgtaatgtacggtcatacagtcaacggctttgcagaggctttaatgaggcagtcaacacattacctgatgatggctggatgtcattgtccaaagatgggctgggggatgtcactatttgtgaaagctttgtcaaattgccggaaccaaatgcatcgcaaatagcctatgtcaacagcatggg

SEQ ID NO: 359 - DNA, 462 bp, Pinus radiata
acgggctctccaacaattaggcatgattcagcagcatgcttggaggccacagagaggacttcccgagcgatctgtttctgtcttacgggcttggctatttgaacattttcttcatccgtatccaaaagatgcagacaaacatatgctcgcgagacagactgggcttaccagaaatcaggtctcaaattggtttataaatgcacgtgtacgcctctggaagcctatggtggaagagatgtatgtggaggaaacaaaggaggcagaagtagaccatggatcaaatgataaaacaggtaaggagagtggcgagaaaaaagaagatgcattgtcaaaggaaggagctgcaggcaataatgggaatatacatgagcagcaaagtgggaaaatctcaaaactcgacaatattgcacaggatggaggtgctgatgaaaaacctgctggtgtgcccaaatctgaaaatgc

SEQ ID NO: 360 - DNA, 357 bp, Pinus radiata
ggagtgttgaaattcccctgttttgatctgataactatgaatctgatggagtcttttgaggcaaagggaaagggagagaagaggagaacggtgagggggaaaacccagttgaagagaattgagaacgggaccagcaggcaggttactttttgtaagcgcaggaatggtctgctgaagaaagcgtacgagctgtcagtgctttgtgatgccgaagtggcacttattgttttctccccaagagggaagctgtatgagttcgctaatcccagcatgcagaaaatgttggaacgatacgaaaaatgttcagaaggaagtaacccgacgagtacagcaaaagagcaagacgtccagtgttta

SEQ ID NO: 361 - DNA, 749 bp, Pinus radiata
gagcttcatccgccattattgggtttcaattcgatcttgatttgccagagacgatgtgaattaccattctgtgggcaaaagcgagagaggaggagaatggtgaggggaaagacccagatgaaaaggatcgagaacgacacgagcaggcaggttacgttttctaagcgcaggaatgggttactgaagaaagcttatgagctctctgtgctctgcgatgccgaagtgggacttataattttctcaccaagagggaaactatatgaattcgccagtcccagcatggaggagattttggaaaagtataaaaaacgttcgaaggaaaatggcatggctcagacaacgaaagagcaagatactcagtattccaaacattccaaacaaaagctcgcaaatatggaagaacagattaggattcttgaatcaacccaaagaaagatgttgggggaagggttggaatcgtgttcaatggcagaattaaataagttagagagccaagctgaacgaggattgagccatatacgggctcgaaagacggaaatattggttgaccaaatagaatgtcttaaaaggaaggaacgtctcttaagcgaggagaacgccttactcagtagaaagtgggttgatcgtcaatccgtggacggttccggttcaacatcatcttcaattggattgggaagcatcgagcagatcgaagttgagacacaactggttataagaccgccaaatgcacaggatcactgttctgtaaa

SEQ ID NO: 362 - DNA, 670 bp, Pinus radiata
gtttgcttgccgtgaaagaaatcgaacttccggcgcttgggtgcgagaaatatttgcaaatcgaacttccggcttgggtgcaagaagcttttgcgttttcggtttcagattaaagcaatatggagtcagaggaagacaaaatatctccagagaacaagaaaaggagattaaaaaccccacagcaggtcgaaggtctagagagcttttatgctgaacataagtatccttcggaagctatgaaatcacagttatcagaagaactgggattaacagagaagcaggtacaaggatggttctgtcacaggaggcttaaggataaaaggctcatgaaggaagaagcttccaacaatggaaaacaagatccacacaatggcataatgcaagattctgttaatggagtcaaacaagattctagcggcagtggaaaaaaatctgatcaccaacgccattcgaggtgcaaagaggttgaaagtcaacgatttgcgaatgccatggattatcctgcagctgtccttgcgtcagagcttagggatcatgatttgttcaaagtaaaccatgataacgaagacacctttgcaggaagtagttcagcttcacaagacagatcgtcattacaaagtgggaatccttatgaagctgaggcaagaagacgcccatttcagaatggtaa

SEQ ID NO: 363 - DNA, 651 bp, Pinus radiata
tagacctaattctgaggtcaatgaatctctgctgaaaacactttggcaccactctgatgccatcatgtgttgctccttgaaggtaaacatgtacaatatcatagactttcttctggagattaatttcaagtttgcacaattcttacgttaggctttgtttggtgctgtgcagtcattgcctgttttcacctttgcgaatcaggcaggccttgatatgttagaaacaaccctggttgccttgcaagatatatcattagaaaagatacttgacgacaatggccgcaaaagcttttgctcagatattgctcaaattatgcaacagggatacgcctatctacctgctggagtgtgtgtttccagcatgggcaggcctgcttcctatgacagggctattgcttggaaggtcctcaatgatgaggaaaatccccattgcatagcattcatgtttatgaattggtcctttgtttgaccattatttttcattgtacaaattataccgagtccttgaagttaacttattgaacaaaatctctttctggtcaagccttgtgtgactggccaaagaaaaaatacagagggagagcatgtaagcagcatatttggttgctacatttttgcttttaatttgaaaaatgaattctgttggacaag

SEQ ID NO: 364 - DNA, 257 bp, Pinus radiata
ccaaagaatttggcacgagcccgccagcaacaacaagttcacatacaattgcgataatcataccttcaactaccttgttgaagatggcttcgcatattgtgttgttgcagatgaatccgttggaaggcaagtaccaatggcatttctggagcgtgttaaggaggattttaagaggagatatggtggtggaagagctgacacagctgttgctaacagcttgaacagagattttgggtcaaaattgaaagagcacatgc

SEQ ID NO: 365 - DNA, 357 bp, Pinus radiata
gtgaattccaaccaaagtaatatgcttatacttcaggagagctgcacagatgcatctgggtcgttcgtaatttatgctccagtggatatagttgccatgaatgttgtgctcagtggaggtgatccagattatgtggctcttctgccatctgggtttgcaattttaccagatgggccaaagtgcatggcagtcaccaattcaggcattaacgacctaggcagtggaggatctttactcactgtggcttttcaaattttggttgactctgtgccaacggctaaattatccctggggtctgttgcaacagtgaatagtctcatttcatgcactgtggacaggattaaagctgctgttact

SEQ ID NO: 366 - DNA, 309 bp, Pinus radiata
attcactggtattttagcagcttttgtttcatctaaggtcacagagcatcagccccctggtcacatgccttcggtcacacagggctccgccatggccaaccccaatttcgtggctttgcataataatcagggtcatgacggaggagcaaatggagaccctgcgcaggcaaatttgcgtttattcaacaattggcagtcagttggtagaaatgcacagagccatgtcacagcagcaggccttcttcagtggccgactctgcttatgggacaacacatgctttatgatctagctcaaggaaatccagggtt

SEQ ID NO: 367 - DNA, 575 bp, Pinus radiata
ggaaggaaagaatggggcgagggcgcgtcgagctgaagcggatcgagaataagattaaccgtcaggtcacgttttcgaaacgccggaatggtctgctgaaaaaggcgtatgaactttcagtgttatgtgatgcagaggtagcactgataatattctcaagcagaggaaaactctatgagttcggaagcgccgggtatggtattgaaatctctggacttttttctgggattttgtattataatattagagttggagaaggctgtgagggagagaagagaggttgtaaagtttattccgtgatttgttttaaaggaaaatcttaaattagctaaaacttttgtgcacgttcaaaaggcctttaaattttctctccagttgagagtattttgagaaaataagccgaatgcgcccgggagccacacaattgtagcaagcttcagtttattttcaaagcatttctccgaataagctagaaatgctaagaattttgtgaatcgctaaagcatttgtaacatatagcgcagatatcaaaaaaataaagaatttatcggtaaaaaaaaaaaaaaaaaaaaaaa

SEQ ID NO: 368 - DNA, 243 bp, Pinus radiata
ctgagagttaagtgattgttgggagggaaaagagaaaaaagaggagatcaagaatggtgaggggaaaaatccagatgaagaggattgagaatacggccagcaggcaggttacattttccaagcgtagaaatggattgctgaagaaagcttacgagctctcggttctctgcgatgcagaagttggacttatgattttctcgccaggaggaaagctctatgaattcgccaataccagcatggaga

SEQ ID NO: 369 - DNA, 184 bp, Pinus radiata
ctatgctattacagaatgtgcctccagcactacttgtccgcttcttgcgggaacatcgctcagagtgggctgattgtaacattgatgcttattcttcagctaccatgaaagcaaatgcttacaatgttccaggttcactgggaggcattacagggagtcaagttatccttccactggcacatac

SEQ ID NO: 370 - DNA, 158 bp, Pinus radiata
acatcccgtcttcactttgttgatcaacaattacgacaacagcgagctcttcagcagctaggaatgatacagcagcatgcctggagaccacaaagagggcttccagagagggccgtttctattctccgggcttggctatttgagcatttccttcatcc

SEQ ID NO: 371 - DNA, 462 bp, Pinus radiata
gcagtggtcatatggatgggggatccggagaggaccaagatgccgccgatcaagatcacgatcacgatcacgatcatgatcacgagcagcagcagacgcggaggaaacgttaccacagacacactgctcgtcaaattcaggagatggaagcgttgtttaaggagtgtccacatcctgatgacaaacaaaggcagcggctcagcattgaattgggcccttaagccgcggcaggtgaaattctggtttcaaaatcggcgtactcagatgaaggctcaacaggatcgctcagacaacgccattctccgtgcagagaatgaaaatctgcggaacgagaacgtagcactccgagaagcaattaaaaatggtgcttgtccaaactgcggagggtctacatcgctgggagagatgcctggattcgacgaacaccatttccgtatagagaatacgcgcttaaaggaggag

SEQ ID NO: 372 - DNA, 510 bp, Pinus radiata
gcaaccggagctttaagactagaatatatatgtagccctcgggctctgacgaatactgaaactagagatacccacctcttatctggtgtgtaaggcacgcaaaatgggaaagaagaaggtggaggtgaaactcattcaaaaccctaccagtcgccaaggatgtttctacaaccgcaagtgcggtttgcttaaaaaagcgtttgagctttctgttctctgtgatgctgaagttgcccttataatcttctcccaaaccggcaagatttacgagtttgcaagccatgacgacgtcaacgcaattctcgcaaaataccggatacaaacgggaacaacaacaaacgcgatgccttcctcgcttcaaaacaccgagccggagacgttgcatgaggagacaaatatgttgggaaaaaggaaaaaagtggagaagttgcatgagaagatcaatatgttggaaaaaagaggaaaaaacatggtttggtgaaaatttggagtcattaacggtcaatgaat

SEQ ID NO: 373 - DNA, 466 bp, Pinus radiata
tggatcaccatgcagtagaggatagggagttaaaaaatcatctccttcgcaaatacagtggatatttgagtagtctaaaacaggaattcatgaagaagaaaaagaaaggaaagctccctaaagatgcacggcaaaagttacttgattggtggagtctgcacgacaagtggccttatccttcggaaacggagaaaatagctttggctgaatgcacggggttggatcaaaaacaaataaataattggtttataaaccaaagaaaacgccactggaagccttctgaagatatgcacttcatggtaatgaacagtcacagtcctcacagtgctgccttgtatgttgagagacatatgatgactgaagggtatctttagattgctagaaagaaccttcggctgaaaacagcacacaatgctattgcttttgttgtatttaattggcatggctttcaattttaaaaaaaaaa

SEQ ID NO: 374 - DNA, 573 bp, Pinus radiata
atctctgttgggatctagaattgagaaagggacgcttgtgggctggtgggtttccacaatgagaggctcctcccgtgcatatgatgcattttattctatttgttgatcctgtcaatggaaaaaaagagagcagtcgaatttggcattgaaatacatgatcagcaagagattgaaacgtagcttatggacccccgaaggaatggtgggggggaatacgaggtaggaggtagccagccgaaagagctgatctcagagaactattatacaaacacagtctgcaaaagaagaaatactgtgatgcatttttggatgatgcagtaaaggcagacacctatgaaaaaattgtttcattctgagatatggaacacctgaatgcagctgctgcccaggcctcctcttcgctttatggagttagcatggccgagtacggagacgtcggcgtcagctcaatgatggcgctgatgacccaacacgagcctcatgaaagcgagagcacaatgacgacgagtatgcctagttcattttcatcgttccatggccatgctgaatgccttctctcagcagcaatgttcc

SEQ ID NO: 375 - DNA, 526 bp, Pinus radiata
ggattcttgtatttttgtgtgttgctgctgcaacagttcttaaataccaagacattgatgagagcttgagtaatatttctgcaaaaacccaagtaaaccctgaagctagtccaaactagtggaaggaacctcggctattctgtaagttcactcagattttgagaaactcttgggattttgctcaaaatggggcgtggtaaaatagagatcaagaagatcgagaacagcgtgcacaggcaggtgaccttctgcaagcgccgaggcggtctgatgaagaaagcctacgagctttcagtgctgtgcgatgcagatgtagcgctcattgttttctcgagccgaggaaagttgtacgagctgggcaccagcaacaacaacaacaacagtatgaggtcaatattggaaagatatcaaaagtgttcacagacggcaaaacatatgaacttttcgaataatacttcagacgagaaaatgaagcaagaaataaatttacttaaacacaaattgatcagctaaacttactaacaga

SEQ ID NO: 376 - DNA, 335 bp, Pinus radiata
aaaatggcggcttagatgaattacgagcagagactcatcgcagcggcacggctagctgacaacctgaactccacgactgcaaaagaatttgatattcccagcgctgaagaagttgccgagaaatgttcagaatggggagtcaccgcacagctgaaggcacaccaggcccaaggactgtcatggctgatacgccgatatgccattggcgtcaatgttatacttggggacgagatgggacttgggaaaacattgcaggctataagtttgttggcttacttgaaagatcgacggaaatgcccagggccatttttggtattgtgtccattaagcgtaat

SEQ ID NO: 377 - DNA, 773 bp, Pinus radiata
gaagtgtggatgttcttactgctttctcaactggaaatggaggaacaattgagcttttatacatgcagatgtatgcgccaactactttagcttctgcccgagatttctggactcttagatacacttctgtattggaagatggtagtcttgtggtttgcgagagatccttgagtggaactcagggaggtcccagcatgcccgcggtgcagcagtttgttagagcagaaatgcaacccagtggatatttgattcggccatgcgaaggtggaggttctctaattcatattgttgaccatatggatttggagccatggagtgttcctgaagtgctacgtccactgtatgaatcatccactgtacttgcccaaaaggttacaatgtcggccttacgccatttgcgtcaaatagcacaagaggcatcttctgatgtggtccttggctggggaagacaacccgctgcattacggacatttagccagagattgtgcaagggtttcaatgaggcagttaatggcttcacagatgatggatggtctttgatgggtaacgacggaatggaggatgtaactattctcgtcaattcatctccaagcaaactgttcggtcaacagtttgcttcttccgatgggcttcctgctcttggtgggggcatcctatgtgccaaggcttctatgctattacagaatgttcctccagcattgcttgttcgtttcttgcgagaacatcgatcagaatgggcagatagtaatattgatgcctattcagcagcctct

SEQ ID NO: 378 - DNA, 407 bp, Pinus radiata
atggcaatggaagagaggagtggtgatcttttgaaaggctgtggtctttctgagaatgcattggatgctatctctgagggttctatacagaatcattggtcatggtcagaagtcaagcaattgtctgtaactcttcttcgtgctctagatgcgggaattgaacactctctccttggttctatgatgtcaatagacagatatgcagcagcagagagctttcatagacttgcttgggcttatgcacacgtgccagatctgcatatcatgtggcttcttcatttatgtgatgctcatcaagagatgcagtcttgggcagaagctgcgcaatgcgcagtggctgttgctggggtcataatgcaggcattggtaggaagaaatgatgctgtctggggaaaggagcatgtaac

SEQ ID NO: 379 - DNA, 385 bp, Pinus radiata
cgaggtcgagtccagctgaggaggatcgaaaacaaaatcagtcgtcaagtaactttttctaagagacggaacggactgatgaaaaaggcggcggagctgtcaatactgtgcgacgctgaagtggccttaatcgtcttctccaacaaagacaaactgtacgagttcgccagttccagtatgaccaagattttggaaagatatcggaagcgttcaaatttaatacaagatatcggtaaagatccacagaattcagacattgagttgacgcgtctaaaagaagaggttgaccgcttacaaagatccagaaggcatcttttgggtgaagaccttcatcaactaggtgctacggatctgcaacacttagaacaacagcttgaagaagcgt

SEQ ID NO: 380 - DNA, 513 bp, Pinus radiata
tttcaatgcccctctttttccagtggacgagtgttcaattttccctgtgttgatctgatacctataaatctgatggattcttttgaggcaaagggaaagggagagaagaggagaacggtgaggggaaaaacccagatgaagaggattgagaacgcgaccagcaggcaggttactttttctaaacgtaggaacggtctcctgaagaaagcttacgagctctcggtgctttgtgatgccgaagtggcacttatggttttctccccaagagggaagctctatgagttcgccaatcccagcatgcagaaaatgttggaacgatacgagaagtgttcggaaggaagtaaaacaacaagtatagcaaaagaggaagatcccaaggctttaaaacgagaaattgcgaatatggaagaaaggattgagattcttgaacgcacgcaaagaaagatgttgggcgaggaactggcatcatgtgcattgaaggatttaaatcagttggagagccaggttgaacga

SEQ ID NO: 381 - DNA, 210 bp, Pinus radiata
cacagttctggaacctgttaaagagaaatcagtcgaggtcaaactccttctgtttgcacgaggatgcccagcattatggagaagcaaaatagtggtgaagatagtgatagcaagggtcagcttgataatggcaagtatgtccgttacaccaatgagcaggtggagactttagaacgtgcttataatgaatgctcaaagcccagcacaagc

SEQ ID NO: 382 - DNA, 380 bp, Pinus radiata
cttcgttctccaggatttctcgacaggttttaaacgacgctagcaaccccctgtgattttacagtctgttttgccaggccggtgaaaatgggtgcattcgcccttctatcaagctggattgatgctgccactaatcccaagtacaggaagaagcgtaaacaatttcagaccgtggagttgagagttcgaatggactgtgaaggctgtgagagaaaagtgagaaacgcactaaattcaatgaaaggagtaagttctgtagaagtggagagaaaacagtataaggcaacggtgacgggatacgtggatgccaacaaagtgctgaagagagtgaggcaaacagggaaaaaggcagaattgtggccttacaagccttaccatct

SEQ ID NO: 383 - DNA, 407 bp, Pinus radiata
ttttcaaacacttggttttcaggcaatttacttgcccctggagccaacaaacagatgcatcttgattccagttctactggagcaccagggctctcaaatgttctgataggctccaagtatcttaaagcagcacagcaattgctcgacgaagttgtcaatgtaggtaagggcatcaagcctgattcagccaaacatcagaaatcacaatcatggattggaacaacagctaataaagagaatagtggagctgaaggtggtgggaaggatggagcagctgctgcccctacatggcgttcaacttcagcccaagaaacaaatgaccgtccctctgagctgtcaccagcagaaagacaagagcttcagatgaaaaaagcaaagcttgtggccatgttggatgaggttgatca

SEQ ID NO: 384 - DNA, 441 bp, Pinus radiata
ggcaagaatagttgcctgatagcacggaatttattaagtggccttagaacgtgttcagagatcgctgaatacatgtcccacaatgtatctgcaatacagcatggagttggggatgtatcaacactccactctgatggtagcaggaagactgattgtggtgatattctgaagttcggacaagagcaagattttggcgtagaaaagggagagtgcggaggtttaagtacacatgcaagtctgctggtcatccatcaatcaggaaaagaattaaagatggaaaaggacagccatgtagacaatatacaccatgtggttgtcaactgacatgtggaaagcaatgcccttgcctccgaaatgggacttgctgtgaaaaatattgtgggtgctcaaagagttgcaagaaccgtttcagaggttgtcattgtgctaagagtcaatgcc

SEQ ID NO: 385 - DNA, 423 bp, Pinus radiata
agcagatgaaagcctttggattccgaacctggatgctggtaaagaaactcttagctatgaagaatacatgcgccaattcccttccacaattacgccaaagcctataggccttgccactgaggcgactagagaaactggcatggtgatcacaaacagcttgaatcttgttgaaacactcatggatgtggatcactggaaggaaatgttcccctgcatgatatccagggcagccacagtcgatgtaatatcgagcggaatgggcgggacaaggaacggtgcactgcaactgatgtatgcagaattgcaagtgctttcaccgttggttcctgctcgagagtacttctagagcggccgcgggcccatcgattttccacccgggtggggtaccaggtaagtgtacccaattcgccctatagtgagtcg

SEQ ID NO: 386 - DNA, 445 bp, Pinus radiata
gcaaagcgaaaatattatgtccacgaggatcccaagctcgttttcatcattccatggccatgccgattgccttctctcagcagcaatgtttcagggttctcaaggagatcataagctcaatccacagcctgggatgaaccagcagctagtctctgagcagtctatcatgtcagattcgtccatgccgtttgttaagacaaaagcttgctctggtcttcgtaatcagtttgaatttcacagggaacaacccggaaattgctacacagatcagtcctcaaatattccgctaagccccatagtcacatcgttagcctcgcaggctcgaggagaagcgcggatgataccgtccttggatgccaacagtgctcatttcaatgtggataacgaggagcatgcaataaaatcgaaaatcttagcgcacccacagtatccgagcttgttggga

SEQ ID NO: 387 - DNA, 343 bp, Pinus radiata
gaactagtcaatcagagatgccatgagaaatcccatctgcacaaactgtggaggacctgctgttcttggcgagatgtcctttgaagagcagcaacttcgcattgagaatgcccgcttaaaagaagagctggatcgattgtgtgcactagcagggaagttctttggcagacccattccttcaatgccatctgttccccttatgcctaaatcatccctagaccttggagtcggtggcatgcccacttcgttgccctcggctagtgcagacttgatgcatggacctgctggtggtcgaacaggaaacataataggtattgagaggtcgatgctggctgagcttgct

SEQ ID NO: 388 - DNA, 1193 bp, Pinus radiata
ccgttgttgttcctttctccaccctcagcgtctccttacacacacaattcaatcaatcccctcgccacgccaccgcgttcgcctgttcttcctcctctggatcaacccattcccacagtcctacttcgctcaatccgacggctaatttttgcgaaatctctgtctctttctcttattaccggtttctgattagaaactggcaaaaacagaggatttagcagtacccaactggggaacagagcgttccgaatgatgggtattgttgtttcctgctgtctggtatctcgcatgcgagctctctggagaagcagcttctttcgccataaagttcacatatctctgggcaactactggttttgctagcgattctgaggtgggcatatgctcagcttttaatgctactagaggacaccgtttgaaggagtttttctctgaggagatgatgatgtctggtgggagaatgtatggtgggccgaacgtccttgtcacggccaacgagaacatttcccgctctgcagatgcactggaagctctactttcttctcctgttttcaatggttcaagatctgtagctaatttggaggaggtgataggtaatgtgtcaaaaagatcattttacaattcctttgaccaggaagaaactggagatgaagaccttgatgattgtatccatccaccggagaagaagagaaggctgactgctgaccaagtgcagttcctggaacgaagctttgagatcgaaaacaagttggaacctgagcgcaagatacagctagccaaggagttgggcctccaacctaggcaagttgcagtctggtttcaaaaccggcgggcaaggtggaaaacaaagcagttggaaagggattatgatattctgaaatcacgctatgagaatttgagagttgattatgatagcctgctcaaagaaaaggataaattaagggctgaggttaccttcctaacagacaagctacacgacagtgaccatgaagccctcacaaaggattctgagtctgctgacaagaaagtctatccccagcctgcctcccactctgactgtgttggggagcctgaaagaagtactgctgccaaggatacaccaccaggttgtaaacacgaagatcttctgagctctggaacagatagcagtggggtcctggatgaagatagtcctcaccatgttgactgtggtc

SEQ ID NO: 389 - DNA, 385 bp, Pinus radiata
aaaattgagaatactacaagccggcaggttacattctgtaagcggaagaatgggttgctgaaaaaagcttatgagttatctctgctgtgcgatgcagaagtggctctcctcattttctccaccagtgggagactctatgaatttgcgaataagagtgttagcgcgacaacggagcggtacatgagaacctatgcagagaacatgcctcagtctcgagctctgtatccggattgtcaccattggcaagaggaagtcagaaaacttacacagcaacgtgatagtctaaccaattcgatcagacaaataatgggtgaaggccttgaatcattaagcatgaaggagctcaagcatattcaagttcaattggaaaaaagtattagttgtg

SEQ ID NO: 390 - DNA, 359 bp, Pinus radiata
gtacactgcagagcaggtggaagctctggaacgcctttacaatgactgcccaaagcccagctctctgcgtcgccagcagctcatcagagaatgcccaatcctttcacacatcgagccgaagcaaatcaaagtctggttccagaatcgaagatgtagagagaaacagcgcaaggaggcaagtcgtctccagactgtcaacagaaagctcacagccatgaataagcttcttatggaggagaacgatcgccttcagaagcaagtctcgcagttggtttacgagaatggctatttcagacagcagatacagactgtttctattaccaccacagatactagctgtgagtctgttgttactagcg

SEQ ID NO: 391 - DNA, 257 bp, Pinus radiata
caagcatgaatttgatgtgcggtatcagaagcttgaggacaaactatatattgcacagctttatttccccctgattggactgatattggatgagatgccggttttttacaacctcagcacagtggagaagcgtgaagttctaatctgtatcatgcagataatccgcaatttggatgacccatctcttattaaggcatggcaacaaagtattgctagaacaaggctctttttcaagcttctggaagaatgtcttgtcc

SEQ ID NO: 392 - DNA, 290 bp, Pinus radiata
ggcctcctcgtgactatgagactcttcgcagcgactgaaccgaaacgtgtcttcgcagtgacaaaacgtatttttcttcttggtttcgtgtctttctttctgcgtgagggcctcgtagccagcgtgtggcttcctgtttctccgcaaagattatttgatttcttgagggatgagagactcagaagcaagtgggatatactatcaaatggaggtccaatgcaagaaatggctcacattccgaaaggacaagatcctcgcaactgtgtttctcttctaagagcaagcatatg

SEQ ID NO: 393 - DNA, 465 bp, Pinus radiata
gctggtatcattatacaacaatcatttgaatggaatattggcagatgaaatgggtcttggcaaaacagtgcaggtaatttcattaatatgttacttgatggaacaaaagaatgacagaggacctttcttggtagtagtgccttcctctgtattgtctggttggctgagtgaaattagcttttgggcccctagcatcagtaaaattgcatatacaggttctcctgatgatcgccgtcgattattcagggagaacatttctcagcaaaaatttaacgtgctcttaactacatatgaatacttgatgaacaaacgatcgaccaagactgagtaaaatttcatggcattatatcataattgatgagggacatcgcataaaaaatgcatcttgcaaactgaatgctgagctgaagcactatcatagtagtcatcgattattgctcacgggaacaccactccagaataatc

SEQ ID NO: 394 - DNA, 157 bp, Pinus radiata
tcccaaagatgctgacaaacatatgctagcaaggcaggcaggtttgacaagaagccaggtctcaaattggttcataaatgcacgtgtccgtctctggaagcccatggtagaagaaatatatatggaagaaatcaaggaagctgagttaggacattca

SEQ ID NO: 395 - DNA, 384 bp, Pinus radiata
accaatttaacggcgaagcaaccgacccccctgaaatccccttaacacgaatttctgagctggggccggtattgtgtagcagcaggatgatgacgccaaggtttatgaatccccccttcgacggaagaacgcagaggcaccgcggacccgatggagatttctacccctggaatcggcccttgaaaatccttaccagggtctcatgaagcactgcacatccctgctaaaaacgctaatgaatcacaaatttggttatgtttttaacgagcccgtcgatcctgtggccctgggggttcccgactatttcactgttattacctcgcccatggatttgggcaccatcaaggcaaaattgcaggacagcgtttattcaagccctctcga

SEQ ID NO: 396 - DNA, 694 bp, Pinus radiata
gttgcactggagttgctgcacgagcttgtggctttgcaggtctcgaaccttcaaaggtcgcagatattcttaaagatcgtcccgcttggcttcatgattgtcggcgcctggatgttttgactgcatttcctacgggaaaaggaggggcagtcgagcttctatacacgcaaatgtacgctccaactacattagcccctgctcgggacttattgactctgagatacacatcattgttggaagatggcagccttgtggtttgtgaaaggtcattgactggtactcagagtggtccaaacatgccgcctgtccagcactttgtaagagcacagatgcttcccagtggttatttgatacgtccctgtgaaggtggaggctgtataattcatattgttgatcatatggacttggagccttggagtgttcctgaagttatacgcccactttatgaatcatctgctgtactggcccaaaaaatgaccattacggcattgagacatttgcgtcaagtagctcaagaggtctcaggtgaagtggttcttggttggggtaggcagccagctgctctgcgggcatttagccagagactgtgcaggggtttcaatgatgctgtgaatggctttgcagatgatggttggtctttgttgggtagtgatggggtggaggacgtgatcattgccataaattcatctccaag

SEQ ID NO: 397 - DNA, 493 bp, Pinus radiata
ccaatatttacgtcagcaattacaattgctgcatgcacgtgctggcaataacaccagatctcttcagcagatggcagtgactgcaaatgacaccagctctgattcagttgtaacaagcgggcaacggcagcaacactcaccgcaacatcctccatacagtgtaagtacctccaggttgtttttcatagcagaggagacattgacagagtttctagcaaaagctacaggaactgctgtggactggatccagatgcctgggatgaagcctggtccggattccattggtgtggtggctgttgcacatgcttgtggtggagtggctgtgcaagcatggggtgttgttagtttggaaccttcagaggtagctgaagccttgcgagataaggtatcttggctttgtgactgccggaagatggaggttctggggacttttgattcaactgatggacggaaattggaactattacatacacagatgtatgctccaataact

SEQ ID NO: 398 - DNA, 436 bp, Pinus radiata
atggggaagacgaagatggagatgaaacacattcaaaaccctagccgccgccaagttactttctcgaaacgcaagaacggattgctaaaaaaggcattcgagctttctgttctctgcgatgctgaagtcgcccttatcattttctcggaaactggcaagatcagcgagtttgcaagccacaacgacatggcaacaatactggaaaaatatcgcatatacacgcaaacagaaacagatggaaacatgggggcttcgtcggtccaaagcgtgaagggatggtttcctaattttctcgagattgcgggattcagtgtttgtggatgatccctattattgcagtgtgggttggggcacgaggggtgcagttgactcgactcatatgattggaaggttggtgaatcacaattgaaagcgttgcacgagaggatggacaatt

SEQ ID NO: 399 - DNA, 419 bp, Pinus radiata
ctcagagctcgacaaaacctacatacattcgtctgtcatccctcccagaaatacctagtgagggcgatcgaggtcgaaaggggcattttacgccattgaagcggtgtgcatagggtcaactctgagaactgattgtgtcttccttcggagggagagggttagcgaggttcagaaagagagagaaagagaaagtagtcctaagggactgtttaaaatggggcgaggtccagtccagctgagaaggatagaaaacaaaataaatcgtcaagtaacgttttcgaagagacggaatgggctgataaagaaggcgtcagagctgtcaatcctgtgtgatgcggaagtggccttaattgtcttctccaacaaaggcaaactctatgagttctccagttccagtatgaccaagattttggaaagat

SEQ ID NO: 400 - DNA, 690 bp, Pinus radiata
cttagcctttccccccaacagctttcaaatatccaattatcctgctttcaaaatcagcctacagactcagaagtgaattgccccagtatttcagaagcaacttcacaggagaacttgaataggtctgatagactaacaagtaaattgtcaggaagtctgagttcttttcgggcttcctcaagggatgggatgctaggaactaaatttctaggtagtgtgaatggccctgagtgtaacaaaccgatgcatcatggtacgaatgcaattggagcagcagagctctcaaacactttaactggttccaaatattttaaagcagcacagcaattacttgatgaagttgtaaatgttggaaagggtatcaagtctgattcagtcaaccatcaaaaatcccaaacatggtttggtgcaatatctgacaaaaagaatattgcaactgaagctactacaaatgaccgaacaacatctgcaataacaggagcttcaatttctgcagaagtaatgaaaaacgagcatgcttttggactcacaccagctgatagacaagaacttcagatgaaaaaggcaaagcttgttgccatgttggatgaggtggatcgaaggtacagacagtactatcatcagatgcaaatcgttgtttcatcgtttgagaccgcagctggatttggggctgccaagacatacacttct

SEQ ID NO: 401 - DNA, 383 bp, Pinus radiata
ttctcgcccgttttttccctgcactcaccacttccatcgccattgctggaaccctagaagaccagtctctttcttttttaactcaggagttaaatcgcaatacaaaactcctgtgctggactctattgtatcatagtattcagcaagagaggccatggggcggggaaagatcgagctgaagaagatcgaaagcacaagcaacaggcaggtgacgttctcgaagcggcggatggggttgcttaaaaaggcacaggagctttccgtcttatgcgatgcagaggtcggcgtcatcattttctctaataccggcagactctacgacttctcgagctccagtatggagaagatgattgaaacatactatcgatttattgaaaaaaatg

SEQ ID NO: 402 - DNA, 846 bp, Pinus radiata
atcaaatctaactggatatccaagtgtaccgttatttggttacttttgttcgcaggatgcttctatccccattttgtgggaggaaattactcagcccatactagagttgaatcctttggggatagacttcctaccattggatttgtgtctgttgcaggctgcataatgtgtttccattttgcgcattgtttctttgaatcttaattgctagttttcctacttttgtatggccttttaggtaacattgttcttagttttacaggtccttgatcggggtgaaaagatagaacttttggttgacaaaacagagaaccttcgatttcaggctcaagacttccagaagcagggaacacaacttcgccgaaaaatgtggtttcagaacatgaaagtcaaactggttgttcttggaattgtctttgtgttgattcttataatctggctctcaatttgccatggatttaagtgccattaatcttgattacttggcagtcctttctagatacaatcctttcgaggcatttatattcattttttggcagcttggcttataatagatgcaggctctctttgaaaagagtatcttttgtgttgtgtctgagtaatgtatttcattcacttggatactctcatcattagatactgattatctatgtttttctctgacgagggacaatgcctcgactcttcatagtttaggttattggcactacccatcagctgtgatgtcaatctcttttataaatatgaatccctgcttttggttttcaattttaacgttcacatagcctgtattatcagcagtgcttaattaacgcgggaaacctttggataaaaaaaaaaaaaaaa

SEQ ID NO: 403 - DNA, 333 bp, Pinus radiata
gccaaattcgcgctctgatggaaatgggaaggctgaccgtagtgattctatgggaacagaagctcgaacacgaacaagattttggcgtagaaggggaagagtacggaggctgaagtacacttggaagtctgctggtcatccctcaataaaaaagcgaattgctgatagcaaagatcagccatgtaggcagtttacaccatgtgattgtcaatccatgtgtggaaagcaatgtccctgcctacgtagtgggacttgttgtgaaaaatactgtgggtgttcgaaaggctgcaagaatcgtttccgaggatgtcactgtgcaaagagtcaatgtcg

SEQ ID NO: 404 - DNA, 881 bp, Pinus radiata
cgcctctcagttctctggtaacgatatgcgtaattatggtgctaaagaagttacttcagggttggctaccggcggtcaacggccgccagctctgcagctaaacctcgcagcccttgatagcagcggagatggcgcagccgctaaagaaaaacgaacgccgaaggttaatccgtattatcttaattcagagtttgtaatggggaaggataagatgccgccgccgccaccggataataagaaagggggaatgaagagaactgctcagggcaagtcagaaattagggaaacaaagagacctgttgctgatcccatgaacggcaagatactgcaagatgtcatgaaacagtgcggatttctgctatccaggctcatcaaacacaagcatggctgggtttttaaagcccccgtggacactgtagcgctcgggctgcatgattataacaccattataaagcagccaatggatcttggtactgcaaaggcgaagctaaatgcaaacgagtataaatcgccacaggaatttgcaggggatatcagattgacgtttaacaatgctatgacctataacccaaatggacatgaagttcatatcatggctgagcagatgttgcagttttttgaggaccggtggaaaccgatttgtgataggtatgaagaggagaagaggaaattgtcatggtcagtaaatgatgggctattacctggggcaagccaaaatatgaagaattttccttttggtgaaaccccaaagaagaatttgaagaagacggagcctcttctgggtttgtcgccacggcctccacctaatgcaaagtccaaggctaatcagactttgcgagcccctgctcccaaaaaacccaaggcaaaagaccttcataagc

SEQ ID NO: 405 - DNA, 434 bp, Pinus radiata
gaaatttgatatatgtgttactagttttgaaatggcaattaaagaaaagactgcacttaaacgtttcagttggcgatacattattattgatgaagcacatcgaataaagaatgaaaattcacttcttgcaaagacaatgagaatctacagcaccaactacaggcttcttataactggcacacctcttcaaaacaaccttcacgaactctggtctcttctcaatttcttacttccagaaatttttagttctgctgaaacttttgatgactggttccaaatatcagctgacaatgaccaacaagaagtggttcaacaacttcataaggttcttcggccatttcttctacggagactgaagtcagatgttgaaaagggtttgcctcctaaaaaggaaaccatattgaaagttggaatgtcacaaatgcaaaagcaat

SEQ ID NO: 406 - DNA, 450 bp, Pinus radiata
aagctcggtaattctgttcatagagcaaatttaagttcaacgcctgcccatactcagattttgggattttgctgaaaatggggcgcggtaaaatagaaaccaagaagatcgagaatagcgtgcgcaggcaggtgaccttctggaagcgccgaggcggtctgatgaagaaagccttcgagctttcagtgctgtgcgatgcagaggtggcgctcatcgttttttctggccgaggaaagctctacgaacttgaaaccagccacagcaacaggaacaagtatgcctgaccatattcaacttctactacacatcaatgccggtggttttaatctacatttattgatcatgaatgtttgcttttgcttcttctaatgttctaggcgggctacatttaatttagagggttcattctggaatctgactagccatcagtttctattctgtgataaggga

SEQ ID NO: 407 - DNA, 376 bp, Pinus radiata
cttggtctcaacttacagactgctgatactgtgatattatttgatagtgattgatgctaaggttatccaggctggtcttttcaacaacacttccacggctcaagatagacgagagatgctggaggagatcatgcggaggggaactaactctttaggaacagatgtgcctagtgaaagagaaataaatcgccttgctgctcgtagtgacgaagaattttggctctttgagaaaatggatgaggaaaggaggcaaaaggaggggtatcggtcaaggttaatggaggagcatgaagttccagactgggtcttttcagtccctacaggaaagaatgacaaaggtgttgaaaatatggattccaatcttggttttgaccag

SEQ ID NO: 408 - DNA, 551 bp, Pinus radiata
aggcggatagtccccatttcaatgaggcggatgcaataaaatccaaaatattagcccatccacagtatccgaacttgttgggagcttacatcgactgtcaaaagattggggctcctcccgaagttgcggcgcgtctagatgcgcttagccatgaatacgaaaaccaacaacatcggtcgagtctgagcatcggaatggacccagaactagatcaatttatggaggcttactgcgaaatgttaactaaataccacgaggagctcacaaagcctttcaaagaagcgatgtcatttttgaagaagattgaagcccagctcaattccctaggcaaaggaacaatacgaatttctccttcagccgagaatgatgaaaagaccgagggaggtgcatcttcagaggaggtcgaggatggcagtggtggtgaaacggactttcaggaagtggatcaccatgctgtagaagatcgggaattaaaagatcatctccttcgtaaatatagtggatatctgagtagtctaaagcaggaattcatgaagaaaaaaaaaaaaaaa

SEQ ID NO: 409 - DNA, 366 bp, Pinus radiata
tgtaagaatgtttttactagattgcaaggaccagtcaaggaaggacgacacacagcactgtttatggagattccaaagagaaatgagaatcccacttactataggcttatagagaaccctattgatgctcgaacaatagaacaacgtcttgaccgcttttcatatgggagtgttcttgactttgctgcagatgtgcagttgatgctggagaatgctatacgtttttatggtcactcttctgaggtcaaggcaaatgcaaggaggcttcaagctctcttcttccagcgtatggctgattccttcccagatgataattttagctcttttaaaactcgaagcttggttgctcttggtcaaagtgcaaat

SEQ ID NO: 410 - DNA, 346 bp, Pinus radiata
ctggtaaattctggtatggcttttggtgcaaaacgatggatagcaactttgcagaggcaatgtgagcgtctcgcaagtgtcttggctagcaatatcccatcaagggaccttggggttatacctagccctgaagggagaaagagcatacttaagttagctgagcgcatggtcacaagcttctgcgctggtgtaagtgcatcaactgcacatacttggacaactctgtctggaagcggtgctgaagacgttcgtgtgatgaccagaaagagtgtagatgatccaggcaggcctcccggcattattcttagtgctgcaacatccctctggctgcctgtgccccccaaaa

SEQ ID NO: 411 - DNA, 393 bp, Pinus radiata
ttttggagtcacagttcgatcaatcatttgaatatccaccggtggagcagttggttaagcagtgtggtaaatttggtttgctagagaggctattaaaacatttgaaagctcaaaaacacaagatgttgatattttctcaatggactaaagttcttgacttgctggaatactatctaagtgagagaggatatgaggtttgtcgcattgatggaagtgttaagttggaagataggaaaaatcagataagggatttcaatgacccagatagcaacttttgtatctttttgctaagcacacgggctggtggtcttggaatcaatcttactgatgcagacacttgttttatctatgatagtgattggaatcctcaaatggatatgcaagctatggatc

SEQ ID NO: 412 - DNA, 830 bp, Pinus radiata
gttaagcttggaacgactaacacttggctcagcagagccgtctcgggacagcacagggcgcagcagcagcagcagcagcactacgcggaacggagcgtggaagagggcaggaaatggtgcggctgcgcggccggctctcgcgactgtattcattctaatttcttgaagctccagaacccggcaagtgcgggttcgagctccgctgccgccaacgcgctgtccggcagatggctaatgcccggacctttgctgaacgacaagattgaggggagggaaggggtcgagctacttggaggagaaattccgggcgagtctattatggcattatccgcacaatttaagactgcgggttctgctgcgccagaaagggggctgttgaatcttcattcggcggatgctgtgaatagcaacggagaacctgtagatagcggaggggccggtggagatagagacggaggggaggaggcggaggatcatgcagcgttgtggcaaagcgccaggataaaagctgacattgtctcacatccgctttacgaccagttactgtccgcacacttggagtgtcttcgcatagcgactccgaaggatcagcactcgatgattgacgcgcaattagagcagtcgcagcatgtcgtcaccaaatattccgtccttggcaacgataatttcctcgtcggcgacaagaaagaactcgatcagttcatgacacaatatgttttgctgctttgttctttcaaggagcagctgcaatatcacgttcatgttcatgttatggaagccgtgagggcatgcattgaccttcagcattctcttctaacactaacaggagt

SEQ ID NO: 413 - DNA, 371 bp, Pinus radiata
aagctgtgcagtacagtctcagccagcagcctctgggactcgatggaatccaacaccagaccagattagaatcctagaaatgttttacaagggaggaatgcgcacccccaatgcagaacaaatcgagcacattacagcacagctgaggcagtatgggaagattgaaggcaagaatgtgttctactggtttcagaaccacaaagccagagaaaggcagaagcaaaagcgtaacagcagcatgcaccaggtagctgctactgcagcaaagaaaactccaacaacaataatggcagataaccctaatgaacttcacaagcccaactccaacggcacatactctctctataatttgcctttcacagcaatgtctg

SEQ ID NO: 414 - DNA, 395 bp, Pinus radiata
gagcactcaaaatggggaagacgaagatggagattaaacgcattcaaaaccctagccgccgccaggttactttctcgaaacgcaagaacggattgctaaaaaaggcattcgagctttctgttctctgcgatgctgaagtcgccctgatcattttctcggaaactggcaagatctgcgagtttgcaagccacgacgacatggcaacaatactggaaaaatatcgaatatacacggaaacagatggaaacatggagtcgtcgtcggtccaaagcgtgaaggtttgactagaatgagaatttgaagtttaacccctgcaaatattatattgaagggaaatcatggtccaaaatcaagtcgccacccaagttaaagtgcaatgtaatcactttagcttg

SEQ ID NO: 415 - DNA, 413 bp, Pinus radiata
caaattcttgtactccacctgcaacgtttcaaggtaatcgatctatgagtgtttttgaaactggaaatgagcgtaaaagaccagctggcaactcctactcggccttggaattgtctgatgacattggggatgaagatggttctgatgattgcatccatttgggagagaaaaaaagaaggttgaccttagagcaagtgagggctctagaaaaaaatttcgaaatggcaaacaaacttgaaccagagaagaaaatgcaattagcaaaggctctaggtctgcagccaaggcaaattgcagtgtggtttcaaaacaggagagcaagatggaaaaccaagcaactagagaaggacttcaatattctcaagcacgactatgattctctgaagcaaaattatgataatcttatggaagaa

SEQ ID NO: 416 - DNA, 355 bp, Pinus radiata
ggagcacccaaaatggggaagacgaagatggagatgaaacacattcaaaaccctagccgccgccaagttactttctcgaaacgcaagaacggattgctaaaaaaggcattcgagctttctgttctctgcgatgctgaagtcgcccttatcattttctcggaaactggcaagatcagcgagtttgcaagccacaacgacatggcaacaatactggaaaaatatcgcatatacacgcaaacagaaacagatggaaacatgggggcttcgtcggtccaaagcgtgaaggttggtgaatcacaattgaaagcgttgcacgagaggatggacaatttgaaaaaaaaggaacgaaacatgg

SEQ ID NO: 417 - DNA, 661 bp, Pinus radiata
ctcctctctgcagagccatacctcctcaatatgctttgcatctcttcttcgttttgaattctcccgtctctgcctaagtaaattctcacaataatatatacagccattctctccatatttccgtaatcggatgatacttctggtttttctgttgctgtcatcgtgagaaagatttgcgtttgtgtgtttgctgaggaaatttagtgttggtagactctcgaagcgtatagctgagagtctttaaacatgggtattatggcttgctcactgggatcccgtatgcctactctgtggagcacaagcttctttcgtcacaagcactttctctagtagagctattatcagaagaactttaggaagcaaggggtagttgtctgtattaaataaaaatggcgtccaatgggattatgttcaatgcttccaatcgaaatttgatcgtcatggtgaatgaagctccatccttcgaagctaattcaagtttggatggagtgatgaagaatgtgtcaaagaggccattctacaatacacttgatgcagacgaagcaggggatgaggatttgctggacgagtgcgttcatcagccaggaaagaaaagaagactttcggtagagcaagttcgctttctggaaaagagctttgagttggacaacaagcttgagcc

SEQ ID NO: 418 - DNA, 323 bp, Pinus radiata
tctagaacgaagcatacgacaacagcgcgcatttcaccacttaggattgatggagcagcacccttggcgaccgcagagaggacttcctgaacgctctgtttctgttcttcgtgcatggttgtttgagcattttctgcacccgtatccaactgatgcagataagcatatattggctaagcaaactggccttacaagaagtcaggtatcaaattggtttataaatgccagggttagactatggaagcccatggtggaggagatgtacatggaagaactcaaggaagaaaaagtggaccaaggtacacacaattctgaagctgaaa

SEQ ID NO: 419 - DNA, 1571 bp, Pinus radiata
gttgttttctgtacagtgtaacatggatatctgatgttcgccacagtgattcttatggatcatacatatatatatttcaaccaggtctgatatatatttgtgggaatcatatctaatactgaaagcatttgctttctgctgctgctgtgatctattcctatgttctgtattcgaatatgatagattacctttactcatatgaagcctctgctgctgctagttagtgtatttatgtttcagtatatatcttattctgctcatgccgggtattttatgctgtggatatggtctgggaattaagagtaaccgaggctcaagaggccgaagctcttagaatcttgatattttaatgtttatctttttaacgtcctttgagatttgacttggccttggctggattggcggatcatgtgtgaagaagattttgttattataaatcaagtttttttatacatgatcatgccaacagcaaattgtaatgagtcatggtcctaatggtggccattcttacagtttgtaggagccaggcatccttcttgtagactttgaggcagcagtcttgttgttcctgctattaagggatatggctatgagctaattagaattgagggcaacaatggaaacgaatctcttaacgcagcaacaatcaggttgccatgatgctgaagaggactatgatggtggttattgagtgttgattaaataacagaccccccaacaatagaaacagaacatcagttggatgctggttatagttgagacagttgggttatgactgtaaaactgaagacattggatggcaatggatttgagtcagaatggctgcatgacagtggttatactttgatttagctggggttgtggtgatggatatatggcagccgtggttttggattttcatgggagtggctgcttgatcaatatatggcagtttctacttatgtggactagtatttcacaaaggggaatgcctatatggaagtagttttataaccatggttatggatttaagtttgatcaattgtatgaaagtgtgtacatggctctagttaagggcacgaggataggaagctctggatatggacttcagcttggtggctgtatgacactgggtgcctttatatgcttaaggatttgagttgggttcattgatttcattttgttgcagataatttgagaagcaatccggggatgaatctaaacgatcatacttacaatttatcacctatggctaattcaggaaatcctgaagagcagattgatgaggatgcagtggatgactttatgaactaccaacccgagtctaaaaagagaagacttacagtagaacaggtgaggtctttagagaggagtttcgaaatcgagaccaagctggaaccagagaaaaagatacagttggctcaagagcttggacttcaaccccgtcaagtagctatttggttccagaacagaagggcgagatggaagaccaagcagcttgagagagattacagcgttctcaaagctagttatgatgctttaaaatctgattttgagagattgcagcaggaaaacaaaaatatccgtgccga

SEQ ID NO: 420 - DNA, 339 bp, Pinus radiata
gattatctcatcacaaaaatctttaatttgctctttgaaccattctgcatcatgtttacaataagtacctgtacaactcacgcacaatctctgatatacagttttgttgcgaggggcaccgtggtgcttgcggagtacacggaattcaaaggcaattttacaggtattgccgctcagtgtctgcaaaagcttcccgccagcaacaacaagttcacatacaattgcgataatcataccttcaactaccttgatgaagatggcttcgcatattgtgttgttgcagatgaatccgttggaaggcaagtaccaatggcatttctggagcgtgttaaggaggat

SEQ ID NO: 421 - DNA, 332 bp, Pinus radiata
tgggtgcccaggcaatattcatgatgacgatgaagaagaagatgaggaggagtgcagcgggactgggcagcaaacgaggaagaagaggaggctgagcttgcagcaggtgagatctctggagaaaacctttgaggttgagaacaagcttgagccagaaaggaaattacaacttgcacaggaattgggcctccagcccagacaggttgctgtttggttccagaataggcgtgctcgctggaaaaccaagcagctcgagagagattacggacagcttaaactcaatttcgagtgccttaaatcgaacttcgatgccatcaagcaggaaaaccaga

SEQ ID NO: 422 - DNA, 461 bp, Pinus radiata
ctgaagtgccgtcgattgttcgggaggatagcgttttcgaagttcgttgttgagttatctcgcgagactgtagaattttagggttgttttccacaaaccgacttttcccgacttcaaatcttgatattgaagtgacatggccggcgagaaaagaaagattaatagaatagctaacgcttcggccaggcaggtcaccttcgcgaagaggcggagggggctgttcaaaaaagctcaggagctatcgattttatgcgaagccgatgtagccctcctcgttttttcttcaactggaaagctgtaccagtactccagctccagcatgaaaatgatattggaccagtatattttgtattctagatcaattcaaaaggatggaaagccaaatctggaggagagtcacgatatccaaaagataaaacaacaaattaaagatattagtcaaaatttgagaaaactgcgtg

SEQ ID NO: 423 - DNA, 622 bp, Pinus radiata
ataatcctctcctacatattgcctcttcctttcctctcttcttcatcatcagtcaattttcccttggagattttacattcttaagaaacagatgggtatggatatggaggactgcaatacagggcttggtctgggaatgagtattggccttgggatgaatctaatgagagaagaccttcaatctcacagacatcatgtcaatggccctcctgtgcagttggatctgctgcctttagctccagtactgccgtcccgtgacttgccatgggggaagacttcacccgggactgatggcgagagatcggccggggaatcgaaagcaaccgtgcccaggcgaatcgatgtgaacaaattgcccgcttcctgttactacaacgaagacacgggcaccattaatgtgtcgtccccaaacagtgccctatcgtcgtttcatgtggactccggtggcgcgatcaacgctgagagcagctgctacggcatgagcgtcaagagagagcgcgaagccaccgaggaattggaggcggagagagcttgctctagggttagcgatgaagaagctgatcaggagggcggcaccaggaagaaactcagattgtccaaggagcaatcggctcttttggag

SEQ ID NO: 424 - DNA, 373 bp, Pinus radiata
attcaaaatgggaaagaagttggagctgaaacgcatccaaaaccctaatagttcacgtgattccttctccaaatgcaagaggggactgctaaagaaatcggtcaagctctttgttctctgtgatgctgaagtttccctcatcattttatctgaaaccgccaagatttacgagtttgcaagcaacaagtcgtgactagctcttgtgaattcttctgatcaagttagagatccatatactgatatataaaagcatactttcacattgcaattggagcagatctagatgcagaagtgcaaccttattatacctaaaggccatcagctgcaaatcaagacccattttctatcttttgagatcgtgatacagagtctg

SEQ ID NO: 425 - DNA, 440 bp, Pinus radiata
ttcgatttcaggctcaagacttccagaagcagggaacacaacttcgccgaaaaatgtggtttcagaacatgaaagtcaaactggttgttcttggaattgtctttgtgttgattcttataatctggctctcaatttgccatggatttaagtgccattaatcttgattacttggcagtcctttctagatacaatcctttcgaggcatttatattcattttttggcagcttggcttataatagatgcaggctctctttgaaaagagtatcttttgtgttgtgtctgagtaatgtatttcattcacttggatactgtcatcattagatactgattatctatgtttttctctgacgagggacaatgcctcgactcttcatagtttaggttattggcactacccatcagctgtgatgtcaatctcttttataaatatgaatccctg

SEQ ID NO: 426 - DNA, 280 bp, Pinus radiata
gtttcactcgttctgccccgtctggattgggctgcactgaaatacattgaacattggagttgtcgagcgcgagatatgggtcagcagtccctcatttacagctttgttgcaaggggcacggtggtcttggccgagtacacccaattcacgggcaatttcacaacaattgccaatcaatgccttcagaagattcctgccagcaataataagttcacctacaattgcgatcgtcacacattcaattatctcgtcgaagatggttcacatactgtgttgttgc

SEQ ID NO: 427 - DNA, 539 bp, Pinus radiata
caacagcgaagccgatttccaaagatggatagggagaaactcatgaagatggctggtgcagtccgcactggcggaaagggtacaatgcgaaggaaaaagaagacaattcataagactgccacggcagatgacaagagacttcaaagtaccttgaaaagaataggcgtgaataacatccctgctattgaagaagtcaatatttttaaggatgaccatgttattcattttgctaacccaaaggtccaggcttctattgctgccaacacatgggtggttagtgggtcatcgcaaacaaaaaaacttcaagatcttttccctggtatcatcaatcagcttggaccagagagttttgccaatctgaggaagattgcagaccagtttcgaagaccggaaccaaatcctgcacagggagaagatgatgatgatgacgatgtaccagagctcgttgaaggtgagacatttgaggaagcagctaagaaagactcctcttaaattttaatagatgagggggcatgggatgtggaacaagctagactgaa

SEQ ID NO: 428 - DNA, 1020 bp, Pinus radiata
cattagcgcaaattcattcccctttttggctcctgccgagcttgggcagattacagagaaaccctagtctcgtggattctcgatcgaaatctgcacggcctgtatacagtcttagcacattcactgagctgccataggtttcttggaactcttttttccgcggctcttgcgagtttcacaggtttttgtttgattgtattttgagggtttttctttcttcgagggttttgttttcccgtttttgtccccttattctttcaagacatctcagaatgatgcagccagccgtcggtgttgctcctccccctcctgttgctgcacccgcaatggatccccagcagcagcaacagcaatggatgatgatgcagcagcagatgcagcctcagcaggctcagcctcagccgcctcctcaggctgggttttggcccccgcaacaccaaccccaaccccagcatgcccaatcgcagcttatggctcagcaatacccgcagcagccgacctcagctgacgagattagaaccctgtgggtcggagatttgcagtattggatggatgagacttatctgcatggttgttttggtaatagccaagaggttgtttctgttaaaattattcgcaataaacagactggacaatcagagggttatggctttgtagagtttgcaagccatgcaggagcggagagagctttgcaaacttacaatggtgcacagatgcccaacactgaacaattttacaggataaattgggcaacctttggcattggagaaaagcggcctgagattggacctgattatcctatatttgttggagatttagcatctgatgtgacagactatttgttgcaagagacattccgaactagataccaaactgtaaaaggagccaaggttgttactgatagggttacaggccgttcaaaaggatatgggtttgtaaggtttggggatgagaatgagcaagttcgggctatgacagagatgaatggggtgttttgttcctcaagacctatgcgaatag

SEQ ID NO: 429 - DNA, 246 bp, Pinus radiata
gcctcttttggtttaggagaaagacgccttctaacaggaccagagcattctatatttgtaggagatttggctccagatgtcacagattatctgttacaagagacgtttcgatctcgatacacatctgtgagaggtgcaaaagttgtaacagatccatccacaggccgttcaaaaggttatggatttgttaagtttgctgatgagaatgagagaaatcgtgccatgactgaaatgaatggtgtttat

SEQ ID NO: 430 - DNA, 323 bp, Pinus radiata
caaggcaagagccaagtctaaagaagcagattatagagacatcagagaaagccatagttttctcccagtggactagtatgctggatttgcttgaggttccactaaaaaaatcgtgtatacaatatagaaggctggatggaactatgtctgtaatagcacgggataaagctgtgaatgatttcaagacactccctgaggtaactgttatgataatgtccttgaaagctgcaagtcttggtctcaacatggttgctgcaagtcatgttcttctgcttgatctttgggtggaatcccaacaactgaagaccaagctattgacaggg

SEQ ID NO: 431 - DNA, 414 bp, Pinus radiata
ccctcggcttcgaagactacgtggagccgctcaagatatatttgaataagtacagggagctcgagggggagaagtcttccatggcggcgccgcccagacagagcgacctgcagcagcaccaccatgtgaacggaagcgatccgcatccatatggccattcgccccacggtcctatggcttaccacgtgcccggaggtgcgagctttcgggcatggaaggtgactgtggcgtgttcattttgttattgtaaagaagtgatagagatggaaatgggtcatggtaatggagactgtaaagtttaaactataaaatgtaaagttgaattcctctctgatgttcagtgtttactttttttgaattttattttttgcccccttttgcattgtacagtctgtagctgtgcatgactgactg

SEQ ID NO: 432 - DNA, 525 bp, Pinus radiata
ctgaaatatcgttaaattcactcttttggtctcagttactgcgtcgccaatatggaaaatctccccaatcagcaacctgaccttgaaattgctcaaacacacgaggatcccgggtcccgccaatttaagggaattcgactgcgaaaatggggaaggtgggtatcggaaatccggatacccaaatctcgagagaaaatatggctgggctcttacacgactcccgagcaggctgcccgtgcttacgacgccgcagtgtattgtctgaaagggcccaacgccaaattcaactttccggaaaccgtgcacgacattccgtctgtgacttctgtttcccgtcaggaaattcagcacgccgccctcaaatatgccttgggccagccccctccgagtttgcagtctctggaagggcacgccgccctcaaatatgccttgggccagccccctccgagtttgcagtctctggaggggcacgccgccctcaaatatgcattgggccagccccctccgagtttgcagtctctgcaa

SEQ ID NO: 433 - DNA, 1196 bp, Pinus radiata
ttcgcttccgaacataagcgcggttccagcgttcgtaacaaacttttgtggcccctttttatcgggagatcgcgggttcgagtccgttcttgtgttttctccgcgtccggagcactcagttcaggtgcccaaaaattgatcgttttcggtcaaatttcgttaatttccgaggacgacttgctagttgtatggttttaattttttttttcaacgaagaaaagtattaaaaattccagcatttacagttttgaggctcatagaccgagggaattgcgatataaagcaaccttctgccctttagctggcaccggcagcagaacgggttggaatggagttttagaagtatcagattgactattcgctgtagaaaaggcaagagcctgtctgaatccgcattggagctgccagatcttgtattctaaggcaaacactggggcgagaaagatttccacggccatttagaaaccgagggctcaaggaccattattttgcaataaaatttctcggatcgtggctatggccttcaccggaacgcagcagaagtgcaaagcttgtgacaaaacggtttattttgtggatcaactgtccgcggatggagtttcttaccacaaggcttgcttcagatgcaaccattgtaagggaacgcttaagctgagtaattactcgtcaatggagggagtgctatattgcaagcctcactttgaccagcttttcagagagagcggcaattttaacaagaactttcagtcccaaagatcaagcaaagcaattgacggtctttctcctgaaatgacaagatctcctagtaaagtgtccatgatgttctctggaactcaagacaaatgtgctacctgtggaaaaacagcataccctcttgagaaggtcactgtggaaaacttatcctaccacaagtcttgtttcaggtgttctcatggggggtgttcaatcagtccttctaattatgctgcactagaaggcatactgtattgcaagcatcatttttcccagcttttcaaggaaaagggaagttacaatcatctcattaagactgcttctatgaaacgagcagctgcagtccctgaggtagcaagtgcagttcctgagatataattttactgtgatctagttacttcattaccatttgtgtttgtattttgaagagtttacacggtatgctagtttgttggggaaaagag

SEQ ID NO: 434 - DNA, 726 bp, Pinus radiata
gttcaattttttcacttgcagtggaaatagaagcctgcaggtacctctaggctaccggagttcaaatcccgcacgatcacactcccttcttttaacattccgagttcgaatccccggaaacttctcgacatggttaagccctcgcaaaaacagaatatccatgtcaatggcaagccggaaagccgctcactgatgtcgcggcaattcaagggaatccggctaaggaaatggggaaaatgggtgtccgaaattcgaatgcccaattgcagggccaaaatttggctgggctcctacgaatccccagagaaagctgcccgcgcctatgactttgcagcgtattgtctgagaggatccaaggcgaggttcaattttcccgactcaccgccggaaattccttgcgcctcttctctatcgccgtcgcaaatccaagccggtgcggcccggttcgccgcagaagaattccagatgccgtcagatgacgacacggcgtcatcgtcctgcggttctgaagcggaatccgacttgccgccggaaattccatgcgcctcttctgtatcgccgccgccaatccaagccgccgcgcccaggttcgccgcagaagaattccggttgccgtcagatgaggacacggcatcatcgtcctgcggttcggtaacggaatccaacattgacagccaacagatttcggcggagcagggttcggcattttgggattcactattcctg

SEQ ID NO: 435 - DNA, 266 bp, Pinus radiata
catcaatggcatcgcttttgttcccgcaggctatgctgcactgccctgcacaatacacagaagcaatgcaccaaatctgcagccacaggtaagggcgggatcaagaggattcgtaggcaacaggaggctgccccttcgccgccagaggaggcaactttgaatcagcaaactccaccgtacagaggcgtgcgtcgtcgcaactgggggaaatgggtgtccgaaattcgagaaccgaaaaagaaaacccgaatctggctcggctcctt

SEQ ID NO: 436 - DNA, 1775 bp, Pinus radiata
acggaccagagatttccaatatcggcgtcgcaagtctttgagtatacgggacgattcccgccgtcgatcgtaattcgtagaatctggacgcggctacaaaatcgctgcccgactccaacgttttctccagttcggccagtgaggaagtttgagggttcacgttattgagagaggacgctatttggttgcgatttcgagtgctgtaagcaggcaacgacgcctgttttgctttagagtttaacagaaaagaagaatgtgtggaggtgctatcatctcggactttataataccccctgcgagccgaggccgccgggtgactgccagggatatatggcccgattttgataagttctctgagtttattaatggaggtgctgcggtggagtcctttgatgtcagcgttgatgtcgatgacgacgaggaggattccgacgatgacgagttcctcgattttgaggagagctatcagaacaagaagaagaagcagcaacagccgatatcccccaccaagggtttcgagcttcctttagctcggggtcttgatggaccggcggccaagagcgcggtgagaaagaggaagaatttgtacagagggatcaggcaacgtccatgggggaaatgggctgcagagatcagggatcccagaaaaggcgctagggtttggctgggtacctttaatacggcggaggaagctgctcgggcttatgatgcagctgcacgaaagatcagaggtaagaaggcgaaagtaaattttgttgatgagccaccaccctccgttaagaaggaaagtaataatgctaagggttccaagaaagggtccagcaagaaaataaaatcatatactaccccaaaggctgactttttcgaaggtttcaaaacggcgaacccttcgattgcccaatacaacttccatcagaaattcccaaaccctagctgtgatgatctagggtatcaaaaccccttgtcgccattacatgccatctgcaatcgaaactttgccgccaaacagtcaagttccgcgttgcctgcatactccactgagttttctgatttcgatgattccgaggtcgataatctggtaccccagcctgcgagttttgaaccgatgaaaaacataaataaacgaaaagggtataattcctttgagtccgacaccagcagcgtgtctgctgatagatcccatatctcgtgggttacagaagtgaaaacccctgaaatatcttctgtaccaaaagccgaagccgactctgatcattatgattttgctgatatgtctacgccggttgcgaccagtgtttcagcaggcagccctgaggtacagcttcctccatttaataatggtttgaacaaatcccctagtgttgaagatggcgtcgctgccgaaaaatcccctaaattggaggaaagttcacagttggagatctctgaggacttgccttctttggaatcatatccgtggttgttccagatgccgtatttcgagggcctggatcagtcgttgcagggtgtgggtattggtgacgcttcgtttccggacggtgagaacgacttgcagctttggagttttgatgccgtgcctatttccgattcagcttattgaattagccttgaatctcttgcttgtaaacagtaattagtaattatgtaagaatcaaggagacttgttatggcttcgttttgcaggccttcgtctaatagggaacttgtttagatttttccccttttttttttttaaattcagtttgacggtgccactgtgatttaatctgcacatt

SEQ ID NO: 437 - DNA, 585 bp, Pinus radiata
accttttggctacatcctcactatctttccatttggtaaagttgaaggggaccgagtgttattttagataaaagttaagacatttatgaaatccaaatctaaaaccagcaaaaaccaaactcagtgtcgatctcatcgatcagagtagaccacaagtatttctggtgtgaatcacatcggagatggcattcgcaggaacacagcagaagtgcaaggcatgcgagaagacggtgtacgtggtggatcagctcacagccgatggttcagtctttcacaaggcctgcttccgctgccatcattgcaatggcaccttaaagctcagcaactattcttcttttgaaggggtgctgtactgcaaacctcacttcgatcagctctttaagaggactggaagtcttgacaaaagttttgaaggaactcccaaagctgtgaaaaatgagaagttgaatgatggtgagattaagacacccaacagggtctctgctttgttttctggcacacaagagaaatgccttgcttgtggaaatacagtttatcccattgaaaaggtttctgtggaaggtgtgggataccacaaggcatgct

SEQ ID NO: 438 - DNA, 351 bp, Pinus radiata
gtttcggcctttggaagagcttctgaatgatgtaaattggaggtcctgttgccggcttagtccatgtattgatttgggttttttcacttttgggttttttcgatttctctggggttttagggtatggatggatctcagaacagcggcggcaatgcggtgcctccgtttctaaccaagacgtatgacatggtggacgacagctccacggactcgatagtttcatggagccccgggaataacagtttcattgtgtggaatcccccggaatttgcacgagacttgttacccaagtactttaagcacaacaatttctccagctttgtcaggcagctcaatacatatggcttcagg

SEQ ID NO: 439 - DNA, 292 bp, Pinus radiata
catgagaagaaggcagtattgtggaacatggatactctcaaagctaaaggttcccttgaagagcattcctttttgatcactgatgtgcgattcagtcctaattcaacgcgcttggctacatcctcttttgacagaacagtcaaagtctgggatgcagacaatccaaactataccttgcgtactttttctggtcatactgggtctgtaatgtctcttgatttccacccgaacaatgaagatcttatttgctcttgtgacggggaaagtgaagtccgttactggagtgttaacc

SEQ ID NO: 440 - DNA, 352 bp, Pinus radiata
aatgggctatttacaggaacttgaagatcagataataggccttcaaaatcttgtgaaacggaatgaacgcttatatggatctggaaacaccccttctggaggagtagctttaccatttatcttggttcagacccgtccacaggcaacggttgaaattgaaatctctgaagacatgcagttagttcactttgacttcaacagcacaccttttgagctccatgatgatgcatatgtgctcaaagcaatgggattttgtgaaaagccatttactgatggtatggatgttactggccatgatagttttgcaaatggaactggattcggagaaaataacatgactataactaacatg

SEQ ID NO: 441 - DNA, 441 bp, Pinus radiata
gacaagagtgttgctgattgatgaccatccactgttccgggagggactggcaggtgcgatccaggccgagccagatttcgaagtcgtcggccaggccgggaccgtggacgagctgcgcgggcttgcgccgcagatcgagccggacgtcgcgatcgtcgacctgttgatgccgtcggtctccgggatcggcgtcacccgcgagctgtgcgagctgctgcctaggtgccgcgtgctggggctgtcggccgtggtcgacgccgccgcgatcgccgagatgctgcgcgccggtgcgagcgggttcgcgctgaagacccagccggcgccggacatcctcgatgcggtccgccgcaccgtggccggcgagagctacctgccgccgagcgtgtcgcgcgaggcgatcgacgccgagctcgccggcggcgccccgccatcgctcgcgca

SEQ ID NO: 442 - DNA, 1056 bp, Pinus radiata
accgagtggagtggggtgtcctaaagggagcgatgtattattgttggtgcgaggaagcagatgagaaggaggggaggccggtgtttgagggttccagatgttccattaccaacgaaaaatccaggtaggtcttcattctattccttcaatcatggatccgccctactctcagtaagctatataagatcattcattcattcaatcaaatccattggagtgcctgttctggtatacttctttgcattggaggtcttggggtttgaccttactcgttcgttcctcgaagcccttggccgcttcccatttacaataacttgtgttgttgcggatttgcacatggtgtatgctgccgacccagaggaaccccggatcgtatattcttgtgactgtaacaaaataattcttgagggtttccgctacggcaagtttgaggcttgggattttgacccagatctgtgttgctgtttgattccgcaagcttggggagatcaggatctgctctttgttgtaaatgtcgatattacccaaatcagattccattcatattagggaagtatgggccgataatctggaagaggagtttaatctgatcagggaaattgttgatgactaccctctgatagccatggacacagagttccctggcatagttgtgcgacccgtgggcaaattcaggaccgtccaagaatacaattatgaaaccctaaggtcaaatgtagacgtattgaaattaatacaattggggctgacgttttctgatgaagacggcaacctcccaaactgcggcacggacagatactgcgtgtggcagttcaatttcagggaattcaacatctgggaggatgcttacgcctccgattccatcgagttgctgcgccagagtggtatcgatttcaagaagaacagcgaacggggcgtagactctcacctcttcgcagagttgctcatgtcgtctgggatcgtcttgaatgagaacgttcgatggatcaccttccacagtggctatgatttcggttacctgctcaagctcgtaatgaatcggagcctgccgcctac

SEQ ID NO: 443 - DNA, 367 bp, Pinus radiata
gagcatgcttgtcctatggcctgtcaccccgggccctgccccccttgtctagtgagcgtgagcaagagctgttggtgtgggagtaaaacgcttgtatcacggtgctcagtactcaacaaagggacgtcaacaaatgccggtgttgggcctgttctatcgtgtggtcaaccatgtggacgtctgctagggtgcgaaaagcatacttgcgagcaagagtgtcacccaggaccttgtccaccctgcgatatcgtagatgttgcaaagtgctattgtggtagacaagaaagggggatggcatgcgggacaggtatagtcgagacctgtgtagtagaaggagagggttcctgggaaggcagatggcaatgcg

SEQ ID NO: 444 - DNA, 553 bp, Pinus radiata
ggtttgtcagatttggtgacgagaatgagaaaaaccgagccatgactgaaagaatggtgtttattgctcttcaagacctatgcgaattaatgaagctacaccaaagaagtccttgggatttcaacaaccttattccatgaaaggtaactattacacacaggcatatggtggtgcagttgctagtcaggccttccagtcagacaatgatccaaataatacaactatatttgttggtgggttagatccaaatgcgacagatgaagatctgaggcaggtttttgggccatatggagagattgtgtatgtgaaaataccagtgggcaaaggatgtggttttgtacaattcaccaacaggtcctctgccgaggaagctttgcaaaagttacacggcactgttattggtcaacaatctattcgcctttcttggggtcgatctccagcaaacaagcagactgcaagctggggagtgcagcctcaagcagatccaaatcaatggaatggtggtggagcttattacggttatggtcaaggttatgaagcttatggttatgct

SEQ ID NO: 445 - DNA, 381 bp, Pinus radiata
gcagtatctgtctcctggcaaatcagctcctttttggctttgccaagatatggcaataacctctcaacaacatcatatgaatgctcttccatataacgaacgcagtgaaaaacgccccaaatttaagggaatccgaatgcgaaaatgggggagttgggggtccgaaatccggatgcccaaaaccagaacgaagatatggctcggttcctacgaaacggcagagcaagccgcccgtgcttacgatgccgccttatattgcttgagaggccccaacgccaaattcaactttccggacactgtaccttcaattccgtcggcgttttctctttcacgccaccagattcagctcgccgccgctagatatgcccgggacgaactgcc

SEQ ID NO: 446 - DNA, 516 bp, Pinus radiata
aaagatagctaggtgccgtaagtctcgcgcagttaaaagaagtcacgaactacaagcgatagtccactcgttttgatgtagtgccagagatcgactcagatagattccgatgttttgggtttctgtttttaaccttggaaggttcaattttacagtttctacgggaattctcatattcaatctgtttggcagattgaactaaagatttttgtccgggtgatttttggattaaattcaaggtcgacgaacgtgaggtgctagggcttttagagtttggatggaacccatggacatcgttggcaagtccaaggatgacgtctcgcttcccaaagcaaccatgtttaaaattataaaagagatgctgcctccagatgttcgtgttgcaagagatgctcaggacttactggtcgagtgttgtgtggagtttatcaatctaatatcttcagaatccaatgaagtttgtggcagagaggaaaaacgaacaattgcacctgagcatgtgctgagagccttgga

SEQ ID NO: 447 - DNA, 396 bp, Pinus radiata
gaaatatcactattttggcttcagagtttctgcaaattgccaaatatggagaatgttcccgagcaggaacctgacaataccatttctctgccacacgaagatcgcggttcccgccaatttaagggaatccgactgcgaaaatgggggagctgggtatctgaaatccggatgcccagatccagaaagaagatctggctcggctcatacactacccctgagcaggctgcccgcgcttacgacgccgcagtgtattgtctgagagggcgcaatgccgaattcaacttttctgtgcccgacattccgactgcgtctcccctttcccgtgagcaaattcagcatgccgccgccgaatatgccttgggcaaagccccttccagttttccctctttcgcaggg

SEQ ID NO: 448 - DNA, 946 bp, Pinus radiata
ggggagacgagatctatctaccgccccctttgtattcatggtctcgggaaacataacaagccctggtcggatcagagaggctcagacaaagatagcgggaatgaattaggccgcactaatttgaatcccggccaaataccgcggcggaggacgaggacgaccacactccggcctaaattcgccgccttttttataattaaaaacataaaaaggccgacgccatgaacgaaccagacgagcacgccgctgctcagctcgtgcagaagcgtagccacccgctggcggaggtggttatgcccatctccgtccgtccgctggcggagaaatgcggcgtggaggcggaggaggagaggaagcgggcggcggagcacaagaagcagcggtccaagaactggacgcgagcggagacgctgaaactcatccgcctgcgagcggaaatggagccgcggttcgcgcgcagcgggcggaagtcggagctgtgggaggagatcgctgaagcgctccgccgagagagcgtggtccgagacgcgcagcgttgcagagacaagtgggagaaattgacggcgagctataaggaagtccgcgacgggcagcgcgacaggcaggacttcccgttctttgacgagctggacccgctgctatctctcaagcctcagaaggcggcggcagcggccgccgctgccgctaccgccgccacggcggcgaattttgtttccgccgagactcccagcaattttccgactgacgacgagatgacggaagaagggtcccctgctgggaagcggagaaaaacgactccaagaggcctctcggcgacggacctggacgctgttcgtgagctcctggagagcctggtgagtcggcagcagaggtttttcgtggatctgctggattccatggagcggaaagaggaaatccgcgagcggattcgtcaagaaaaggagga

SEQ ID NO: 449 - DNA, 1140 bp, Pinus radiata
gctttatggagttcatatcacgtacagcagctgagaagattatgcaaacttataacgggacattaatgcccaacactgaacaagctttcagaatgaattgggcatcatttagcatgggagaaaggcgtctggatggaggtccagattattctatttttgtgggagatttggattcagatgtctcagatttggtcttgcaggagactttccaaactcgatatccatcagtgaaagctgctaaggttgtcatggatgcaaacacagggcgttcaaaaggttatggatttgtgaggtttggcgaggagagtgagagggcccgagccatgacagaaatgaatggtgtatattgttctactagacctatgcgaatcagtgcagccaccccaaggaagtctgcaggagttcagcaacagtattcaggaagagcaggcaatggtggatctcatgcccaaggattcccgtcagacaatgataaacaatacaactatatttgtgggacggctagatccaaatgctacagatgaagatctgagacaagtctttggccagtatggtgatcttgtgtccatcaaaatacctgttggtaaaggttgtggatttgtccagtttgcgaacagggcttgtgctgaggaagcattgcaaaggctccatggtactgttattcgtcagcaaactatacgcctttcttggggtcgaagccctgcaaacaagcagaattctcagccacaggggcaacagcctcagtctgatccaaatcaatggaatggtgcttactatgggcaaggctatgaaagctatggttatgccccccctcctcaagatcctgcaatgtatgcttatggtggctaccctggatatgggaactataatcagcaggtaagctagagttacaagtctctaaagcttggtcacactaatgttgcaagggctgtttatttgcccttcaagttggcttcatttgttttcagtctggaggctgcaattgttttgttttctttaccaggtatagcaacgtatttgctagttgtgtaagcacataaaaattattgcttcatattcaggttttcattatctgagatcaacatatattttccctagttatattacatatttccttataattttaaaaaaaaaaaaaaa

SEQ ID NO: 450 - DNA, 390 bp, Pinus radiata
acatcataccaccgaccttgcttcaagtgctgtcatggtggttgtgtcatcagcccctcaaattatgttgctcatgaaggcaggctatattgtaggcatcatagctctcaactttttagggagaaaggtaacttcagccagctttcaaaggcaacacctacaaaaggggtgactgagaactcagacacagacgacaagtgatcattcgggccagatttttgttgagagagttgtagtgtgtaattgattcatttcatacatttgatatgcaagcctgtatcaagcttatcgataccgtcgacctcgagggggggcccggtacccaattcgccctatagtgagtcgtattacgcgcgctcactggccgtcgttttacaacgtcgtgactgg

SEQ ID NO: 451 - DNA, 460 bp, Pinus radiata
gagtaggaggcggcggcggaggcaagggaagcccgtacagaggcgtcaggatgagaaaatggggaaaatgggtttctgaagtgagggagccgaacaagcggtctcgcatatggctcggctcctattccactcccgaggccgctgccagggcctatgatactgccgttttctacctcagaggaccctccgcgactctcaatttccccgaggaagcacgtaaggagcagcagagcgacctcaggctttcgcagctcggggagctctcaccgtcctctattcagcggagagcggccgaggtcggcgcggccgtcgaccatgccatgcaggcgggcccggttcctgctcagaccctgagggaaataaaccaagaaaatgatatgaagaacgccttgagctcaaaattgagcgagggcaataatttcaagatcgaagcaaaaaataatatgaggcagcagggctt

SEQ ID NO: 452 - DNA, 1116 bp, Pinus radiata
gtagatttaaatgcttttttgaaatccggttactcgcaagattatcaatcgggactgtagccgaagctttgagaggttgaaattcagacttttgctccgaactgttctgctgaaacaaaatccagtattgagctaggtttagaatcgggtttgctggtcatctgggagaggcgatccattcagcttcgcaggcccccgaagatggcgttcgccggcacaacccagaagtgcaaggcatgtgaaaagacggtctatttggttgatcaattgacagctgataattctgtttttcacaaatcctgtttccgctgccatcactgcaatggaactttaaagcttagcaactattcgtcgtttgagggagttctatattgcaaacctcattttgaccagctgtttaagagaacaggaagtttggataaaagttttgaagccattcctagagcatcaagaaatgacaagatgcatgagaatgagaacaggacacctagtagggtatcagcattgttttccggtacacaggataaatgtgttgcatgtgggaagacagtgtaccccattgagaaggttgctgttgatggtacatcataccaccgaccatgcttcaagtgctgtcatggtggttgtgtcatcagcccctcaaattatgttgctcatgaaggcaggctatattgtaggcatcatagctctcaactttttagggagaaaggtaacttcagccagctttcaaaggcaacacctacaaaaggggtgactgagaactcagacacagacgacaagtgatcattcgggccagatttttgttgagagagttgtagtgtgtaattgattcatttcatacatttgatatgcaagcctgtacaatagcctgtgactgttaagggcattcttttgtctccctgttgctatttgggtttccggtgtgttcattttcacttatttttgtgttttagctggaagaatttgagagggtagaattgtgtcatcgctatggcttgtgcatgactcatgagccagcagttgagacttttatttattagttatagtactatatctagtcgagttctcaataaaagatagtgttatgctgttgggcagcaaaaaaaaaaaaaaaaa

SEQ ID NO: 453 - DNA, 439 bp, Pinus radiata
ccggttcctagttcgaatccttgccctaacgcagtcccgtgttttaagactcaatctttagtgactcccccgcaacatggttaagcccttgccaaaacagagcagcccgagcggatcggaaaactgccaaataaagtcgcggcagttcaaaggaatccgactgagaaaatgggggaaatgggtgtcggaaattagaatgccgaattccagggccaaaatctggctgggctcctacgactccccggaaaaagctgcccgcgcctacgactttgcgttgtactgtctaagagggtcgaaggccacattcaattttcccgactccccgccggaaattccatgcgcctctgacctgtcgccgccgcaaattcaagccgccgcggccaggttcgctacagaagatttccggctgccgtcggaagaggacgcggcgtcctcctct

SEQ ID NO: 454 - DNA, 481 bp, Pinus radiata
gcaattcctagtctcatttcagtgattcactcactgaaattattgttagaatcactgttttggccccagagcttctgcgtcgccaaatatggagatacgcctccagcaggaaaacgaccaggacattgctccgccacacgaagatcgcgtgtcccgccaatttaaaggagtccgaccgcgtaaatgggggatatgggtatcggaaatccggatgccgagatctcgacagaaaatatggctgggctcgtacaaaaagcccgagcaggccgcccgcgcctacgacgccgcagtgtattgtctgagagggtcgaacgccaagttcaatttccccaattctgtgcccgacattccgtctgcgtcttctctttcccgccagcagattcaactcgctgccgccaaatatgcgttggatcagtccccttcaagcccgccgtctctgaacaataataaagaggaacccgcgtcaccgtcgcagtcgtct

SEQ ID NO: 455 - DNA, 382 bp, Pinus radiata
ctcccacctccatttcactctgccgagtccattactctccctatcgtcgaaccacgtctttctcatcgaccaacaatgactcagcagacaacctcaccaacagttagtcccgccgcacttgctcttcccacttctgcctcatccacatctgcaaagtctgcagctgttccagtaccagcccaagccaaccctcgcaaacgtcctcgttcggatctctccgcagaggagaagcgagaggctcgtgctcatcggaacagaatcgcagctcagaactctcgtgacaaacgcaaacagcagttcactagtctcgaacaacgagtcatcgacctcgagaacgagaaccgccaattacgagacgctctcgccacttcgcagccgaacc

SEQ ID NO: 456 - DNA, 201 bp, Pinus radiata
aacttctgactatttttgaagctgtatatgtacataaagggatcgttaatgcagcgaaagtgcttaatctgaccccctcggcaatcagtcagtctattcagaaactgcgcgttatattccctgacccattgtttattcgcaaaggccagggtgtcactcctaccgcatttgcgatgcatctacatgagtatatcagtcagg

SEQ ID NO: 457 - DNA, 435 bp, Pinus radiata
gctctggggacttggtgttttctcccaatcctaaaactaaatgttattatctgaaatagggaaacaagattacagcagcagcgaaggacaaatgaaagggccgcaggggattagcaatgctcaaaacacttgtaccaaattccgaatgccaacatcagagaacttgattcccattcgccttgatattgaaattgatggactacgtttgaaggatgcatttacgtggaatgtaaatgatccagattcagagattcatttatttgcaaggagaaccatcaaagatttgaaatatccgggaagtttcataacaccagtagtacaatctattcaagcacagttagcagagtttcggtcatttgaagggcaggaaatgaacacaggacaaaaagtgctcccccttaagcttccctaaaatttagtatatatatcctcctt

SEQ ID NO: 458 - DNA, 654 bp, Pinus radiata
aaagctagataacgtttcgttttaaatacagcgcggccgaggcggccggtcagtcaacggggtttctagtgcggtcgtctatattttctactctcctttccactctgcaaaatcagaccttcatccattccccacggcattagattcaatccattctattaggctcctttaagcgaggtcgcgggttcgaacccgatcgaatgatgcgaattggataccgtttggtgtagaattctgatagatttcgtgcgatggagggttcacagaacggcagcagcaatgcaccgccccctttcttaacgaagacgtatgatatggtggacgacccggccacgaatgctatggtgtcatggagccccggaagcaacagttttattgtgtggaatcccactgaattctcccgtgttctcctccccacttactttaagcacagcaacttctccagcttcgtcaggcagctgaatacatatggttttcacaaaattgatccggaacggtgggaatttgcaaatgaggggtttctgcgaggtcataggcatttgttgaaaaacattcacaggcgcaagcctgttcatagccacagtcagcagaaaggagagagtttgtctggaggatcatgtgtggaaatcaaacaacttgaagatgagactgaga

SEQ ID NO: 459 - DNA, 675 bp, Pinus radiata
aattgaatcggccatggttttgtatgaattgttacatgtacagcagattcagcaaatacagcagcagcagtttcaattgcaacaacaacaaatagcagcagcggcttcaatccaccatatgggtcgaaaccctctgggtcccagagatcagcccatgaaacttcatggcagcagcctatcaaagccggctaagctttacagaggcgtgaggcagcgccactggggtaaatgggttgcagagatcaggttacccagaaacagaaccaggttatggctggggacttttgatactgcagaggaagcggccatggcttatgacaaggctgcttacaggctgaggggtgactatgccaggctcaattttcctcaccttaaacaccatttggaagcaaattccttcgccccctggactggtaattctgtgctgccatcgtctgtggatgccaagctacaagcaatttgccaaagcttgaaacaacctttggaaagcatgtctaagaccgaagaatcagaagaaatttcatgtgcatatgagaattcgggctctcttgggtcggtgcgggatgaagatgcgaagaagaatgatgttgtctctgtcaagtccgagacttgtgattctgatagtagtgatgattccaccattacagcgttgaattcatctggggatcagaatcc

SEQ ID NO: 460 - DNA, 1014 bp, Pinus radiata
cccggatagaagcccccggtcggagaacgaatccggcggcggtcacatgggcggcagcgcatttctctgtgaaagagcaggatcggttcctgcccatagccaacgtggggcgcataatgaagaaggccctgcccgccaatggcaaggtttcgaaggatgccaaagaaactgtgcaggagtgcgtctctgagtttatcagtttcatcaccggcgaggcctccgacaagtgccaacgggaaaagagaaagacgatcaacggcgacgatctgctgtgggcgatgacaaccctggggtttgaggactatgttgagcccctcaagatctatctccacaagtacagagaaatggagggcgagaaggtctctatggccaaacaaggagacccgactccttccaaggaaggtaacaacgccattaatggctcctcaattgaaaaccctaatgctaatgcctacagtggtttgaaccccggcggttataatagggtacagtcgcagtctctgccacatatgcagcaggctgcctatgggcaaccgccaggtggaatggtctatggccaccacggccacattatgggggcttacaatatgaccgccccaaatagcagtggtggaaatagcagtggtcagcaacagcagcaagcccccagaggccaatggtagaaatatttactttttcttttctgtttttctaatttttacgggtcatgtggggacagctggtgccttagttaaagtagaatggcatcaccaacccaaccaattctttactagtttttggctgaaatgattccatctcttgcatattaaagaagcccctcaagctcaggaggggactttgaagtgctaaagaagtctctcaagctcagaacactggaaaaatgggcgggttgttgttactaactgttctgtaaaaatttaccagaaatgttgttcaaactgtctgtatttagtaggtactgaatcttagtgaatctgcttctgtatatctattttcgctccatttggaagatag

SEQ ID NO: 461 - DNA, 301 bp, Pinus radiata
ggctgcaccactgtagtagaaactttagccaagtggcaggagctgaacagccaggtggaaagctcaaaagatggcgcgaaaagactcaggaaagcccctgccaaagggtcaaagaaaggttgcatgaaaggaaagggtggtcctgataatggacgttgcaactatagaggagtcaggcagagaacgtggggaaaatgggttgcggaaatcagagaaccgaatcgtggaagtcgactgtggttgggtacgttctcttcagcggaggaggcagcacgtgcttatgatcaggctgcgagggtta

SEQ ID NO: 462 - DNA, 384 bp, Pinus radiata
gttcagagggtaagtgaagattcgaaaaacaatggagattgtggggaaggccaaggaagatgtttcactgccaaaagcaactatgaccaagatcatcaaggagatgttaccagcacatgttcgtgtaaccagagatgctcaggatcttctagttgaatgctgtgtagagttcatcaatttaatctcgtcagagtccaatgacatatgctacaaagaggagaaaagaactattgcaccagaacatgttctggaatctctaaagattcttggctttgggagctatattagggaggttaaagctgcttatgagcaacacaggattgagaattgggattgtccaagagcaggaactagatggagtaaaaacagattggaaatgacaga

SEQ ID NO: 463 - DNA, 484 bp, Pinus radiata
gaatatcaatggggttgctgggggagttgccaaagagaaaaaggtaaattttccatggtgtgcattggaaaagcaagtagggacatcatcttttgatccaaatttggcttctagcaaacaagcaatggatagtctaatcatgcagcaactgcctaccttcctccaatattgcaaagatctagaagagggcagacagtcatggtttatgcacaagaaggaagctacctggaggctcagtcggcttgagcagcagcttgaatctgagaaagctcgcaagcggagagaaaaaattgaagaggtaggttcaaaaatacgtgccctcagggaggaagaaataacatatcttgacaaactggaaactgagtgcagggagcagctttctagtctccaaagggatgcggaaatgaaggaggctaagatgatggaattgtgggctaccaaacatctgcagttgacaaaattcgttgacagtgctttatcagtt

SEQ ID NO: 464 - DNA, 1434 bp, Pinus radiata
atggttttaggttttaaatgtagagcaggacgtgcctacttttgcttcatttatgcatatgtcttttgttgtcactattcgtctttaatccccactttgcctgcctggagagaagaggagaggaccctgccctgctatttggccttgtgagcgattcaggagaaatggggtggcaacagcagcaaggaggagagaatgaaaattgaataaaacgaaggatctgaatcccccttgcgcgcaagcaatggctcgagagaccaattcttttgccctactgggcggagatgacgaccaaggcgatgatgatctcatggcactcatcaacagcgcggccaccctcaagccagaaaagaagcccaagactactgccaagaaaaacggccagcagcagccgccgcccccccagtctcagcctgctaaacttccttccaaaccccttccgcccgccgaagccgtgagggcggatagaggaagaggaaggggcgggcggggccgcggtggaggccgtggcagccgctttgagggcggtgaatacaacaccgagagcaacggatatggtggtgggggcggttttggaggcggccgaggctggggtcgcgatgaggactctgggaaccgaggttggggtcgtgaagaggacaccggaggccggggttggggtcgaagcaacggcgaagaggacaccggtggccgaggttggagtcgaagcaacggtgaggacgacgctgctgcaggcggaggacagagccgcggcagaggacgtggacggggcaggggccgaggctttggtggtcgtggtagtggacgcttcggtggaggcggcgacagctatggctacgatgccaatggacaggaccgccctccccgtcaacagttcgaagacaccaataccttcacaggcacagacaactgggatacccctgaagtgtcagtcgttgatgaagctaaaaatgtggagcctgaacagaagaaaccagaagaagaggctacaccaggggttacctctgaaaataaagataacaaagaagaggaggacaatgaaatgactcttgatgagtatgagaaattattgaatgagaaaagaaaaacattggaagctttaaaaaatgcggaaagaaaggttattctggacagagattttgagaaaatgcagcttgttgataagaaaaatgatggcattttcatcaaactgaactcagaaaaggagagacaaagaaagaaggagacccttgaaaaagaggaaagagcccgtaagtctgtgagcataaatgagttcttgaaaccagctgacggtgagagatattttaccccatctggcactcgtgggcgtggccgtgggcgtggacgaggccgtggggacggtgttagcactagaggaggttttggagggaggtacagtgatgctgatcaggttgctgctccttgcattgaagg

SEQ ID NO: 465 - DNA, 364 bp, Pinus radiata
acacatgggcacaagaagaagaaaagagcccacgagccattgggggggagaaaggtgggaggggacttcgccagttcagcatgaaagtatgtcaaaaggtcgagagcaagggtcggaccacgtataatgaggttgcagatgaattagttgcagaatatgcaaatcctaacagtgcgctcatttctcctgatcagcaacaatatgatgagaaaaacataaggcggagggtgtatgatgcattgaatgtactgatggcaatggacatcatatcaaaggacaagaaggaaattcagtggaaggggttacctagcacaagtcctaatgaccttgaagacttgaaggcaaagcgcatgggattgcgggg

SEQ ID NO: 466 - DNA, 237 bp, Pinus radiata
gtcctatgaagctttacagaggagtcaggcagaggcactggggtaaatgggttgcggagattcgcctcccacgaaaccggacccgcctctggcttggcaccttcgacacagcagaagatgcagctctagcatatgatcacgaggcttacaaattgagaggtgagaatgctcgtctcaacttccctcatctgtttttaaacaagggatctaccagccctaaagcttgttcagttgcgg

SEQ ID NO: 467 - DNA, 578 bp, Pinus radiata
tctttctcgtgccgaattcggcaccagacagaaccaaccctaattttgatagacacagcagggtgtgatatggaggagaaaaaagatgacgaggacagcacaatgaatgaaggcgaggcaacagtgacactaatgcatgcaaaaaaacttctagaaagtggagttaatccctctgatattggcatcattacaccttatgcagcacaggttgggctgttaaagataatgagaagcaaagagatgaagttgaaagatttagaaatttctacagtcgatggctttcaaggccgagagaaagaggcgatagtcatatcaatggtccgttctaatgcaaaacacgaggtaggttttctaaatgaccgcaggcgaatgaatgtagctgtgacacgtgcacgtagacaatgttgtattatttgtgacactgaaacagtgagcagtgacaaattcctgaaacgccttgtagagtattttgaggagcatgcagagtatttgagtgcctcggaatatcttacttgattgtgacagcttgaaaatctgttgcctacaataacccatgatacactgagactacttttttt

SEQ ID NO: 468 - DNA, 432 bp, Pinus radiata
gcgctccttacggttctacgcatggtattcgagcttgcgacgcgcccactttcttgcgagctcattctgttcggcctcagaagggtctggccggccaagcttgagcttttgtatggctgaagctgttgccatgtttaacgtgataatgagaaaaatgctcagaccaagtgtcaggtagtacgagctcgtgccgaattcggcacgagctgggatacagtagaagtgccaagagatgtaaggagaagtgggaaaacatcaacaagtatttcaggaaggccaaagagagtaacaagaaacgtcctgagaatgccaagacctgcccttactttcaccagttggatgctttgtacaagaagagaaatctgggcaacaggcacaacaaaattatggtcctgagtattttctctgttgcttccactgggctgttcatgc

SEQ ID NO: 469 - DNA, 657 bp, Pinus radiata
gtttttccgcaggaagttttgatttgagtaggaaatcctttggcctcctggagctttgatttgctcaggaaaccctagcccttcggttcctgaagctttgcttttcgtaggaaaccctttggcaccggtaggcgatggctcccagcaacaacagaagagacgacaatggagcacgaggagttcacttcaggggcgtcaggaagaggccctggggtcgatacgcggcggagattagggatccatggaaaaaagttcgtctttggctcggcacctttgacacggccgaggaagccgcccgggcttatgacactgccgctatctccctcagaggtccgaaggcgaaaacgaattttgcatactcctcgccgtcctcctcatcatctctgcacaataatcagagcagtagccaaaacagcagcacggtggagtcctggccctctgcggcccctgtgactcgatccggagacctcgagcttcccgcttcttttctccctcgcctcggagtttccaccgggcggcgggttttaaatggtggaaacccccggtccgggcgccggcggagtctttcggagaaaaacagcggcagaaaagctgaaggcgccgaggcgcgaaccaccctaagcgattctgattcttcttcttctgcggttctagacg

SEQ ID NO: 470 - DNA, 581 bp, Pinus radiata
gtccagcaacagcagcagcagcatcagcagcatcagcaacaattactgcagcatcaacagcagcagcagatggcagatgctgctgctgcaatctatgcctcatctgtaaagaggcagggtaatgggacaatgatggggcagggtaatggaacaatgatggggcagggtaacggggcaatgatagggcagggtaatggggcaatgatagggcaaggtaatggggccattgatgggatcaccccttggaggaggacttggtctttcccctagaatgggtggagggattgggaatggcctacaaggaggattgggggtgggcttggcgggtctcggagctactgcgcttaccattggagcagcatctcccgccaaccagctttcttctgatggtatgggcaacagccatggagacaactcaacagtatcgccaattccttatgggttggacgtaagtgtaagaggcaggaaaagaggtggaccggtggagaaagtagttgaaagaaggcagagacgtatgataaagaatagagaatcggcagcaaggtcgcgagctagaaaacaggcatataccgtgaattgga

SEQ ID NO: 471 - DNA, 451 bp, Pinus radiata
ccaaaatggagattgagaaacaagaggaggatcctctggagattttctgcctccacccccgacaactaaatgctcagaggagctgcagaataagatcaccaaatatattgctttgaaaagtgctggaagaagcttcaacaaagaactacgcaattcaaagggatatcgtaatccagatttcttgcagcgtgctgtgaagtaccaggggatagatcaaattggtagctgcttcaaaaaggaaatatttgatccacatggatatgatccgagtgactattacgatgctttagctttggagctcaagagagaatttgaaagaagagaacaagagaagcaaaagaatcaaagggtagattttgttcatggagctgtacaaactacatcggtacagtcagtatcaaagccaattgtgcaggtcatgggtggtcaaaaggtgcctgttgttggggta

SEQ ID NO: 472 - DNA, 1286 bp, Pinus radiata
gacgttcctctttacttttacaacttgtaccgctggccatgaaaacagccggggagatctgaaattttccactaaagtttgtttttttgctggttctcgcttgggcctccataggacctagctggacacctcgaatctcctccggtcattttttgttttgacagggccggtttggtgattagggtttcagataacaggaggacaagtgttcgaattcgagagaagccagaatgagctctccgcagagcaataagtggctgtcatatttcgacgagccattgttggatgatgtaggcgtggggcagccggccaatccattcttctggtgcggtcagggcataaatgatcagcccgacgtaagtgtagaaattgatggccccaataaggacatggacgagcaagataaattatgtcctagaaagaggtcacgggaagaatctagtggtggacctgggtcaaaagcttgccgtgagaagatgcggagggacagacttaatgatagattcatggagctaagctctgtgttagaaccgggtaggcctcccaagacggcagacaaagccacaattttgtctgatgctgcacgtgttatgacccagctacgaactgaggcgcagaacctgaaagctgagaatgaacgactgcaggaagccattaaagatctgaaggcagagaaaaatgaacttcgtgatgaaaagctgagaatgaaagcagaaaaggaaaaattggaccaacaagtaaaagcaatggctttgcctacaggctttgtgccgcatcctgcagcatttcatgcggctgctgcttttgcagcccaaagtcaagcagcagcaaacaaaactatgcctgttccaggatatcctggaatggcaatgtggcaatggatgcctccagctgtggttgatacttcccaggatcacgtgctaaggcctcctgttgcttgaagcaggctcttattttatattccaaactggtgctactatttctttggccctcgaaacgaccttagtttctttggtatccaagttttagatgctaggtgccattgcatcagttcaatattctaattttttttatattgtgccatagagataattgaggataattacaattcatcctgatgatgaaatggattaactgctgtattatgaaaaattacactggagctttgcagaacaattattaatcctttgttcatggtcatgacatgtcttgaactggagatcgctcgaacacttacagttggtataaacatcttgacatttcgttcaaaaaaaaaaaaaaaaaaa

SEQ ID NO: 473 - DNA, 1358 bp, Pinus radiata
caaatttccaaaaccccagccccccacgtcaaagtgatgtgaagggacaaatcccttgaacaaattttcaaatgctatttatatatgaaatgacggtggagcgagagccacgggaagtagcgggtagaaggcaggggtataggctttttgggctgtgtctgtcgcttcgagacgacttctcattggagcgaaacgcctctcggcatttgggtcagtgaaccaacgaacgctggcttcaaggttttcgttttatctttcttatttcacttccttggatttagtttcctttcgatcctgaaaccgattcattgtgtgagttttccgcgaattaactgatcagggtttcggcctctgtatcaaatgttttggggagcttttctggtttgaaatgacgaggcccacatggcgaaatcactgttttccctaagctgaatgactacaacccatcttcagggcatctataactgtaaatttcgatacctgggtcgatccgtgtgcgaccctcgtccgagaaaagagagcacagcagcattggtaggtctcggtttcaatacacagctggggaagaatttcaaaataaaacgcaagcctcgggtttgggctccagaggcacacacgacaataatacatcataggagtagcggcgtaggtcgtgtgttcaaaccccatccagggaaaataccgtgaagctcgcttgtcgcaagttcgactgacatcgactgaattgcatttcttagtcggcaaaaatattaaagagtcaagacaaagagggggttacgggagcaggctgcgggttcgatcccaagataaggaaaaaagaaagaaaatttcatgaattgggcctgtaggttccagtcacaaaattaaaacctatcggtctcgtcttcgagctaaagttggggaaaaaactaagctctcagggaatgggttcccgcacaatgctgtcctctaatggtggccggacacctcagttccaaccactcgttcgtcagaattctttatacaatttaacgctggaggaggtccagaaccagctcggggacgccagcaagccgcttagcagcatgaacatggacgagctcctgaagaacatttggacacaagaagaaagccaggctatatccatggcgatcggcaatgggcccatgaacggtgttcctcccaactctgcccctgccagcggtggtttgcagcgtcaggggagccttacaattcccagaactctcagccgcaagactgtggacgaggtgtggagagatattcagcagagccagggaaagagtaacgaagagaagaagccgcagcagaggcaatccacctttggtgaaatgaccctggaggatttcttagtgaaagcc

SEQ ID NO: 474 - DNA, 517 bp, Pinus radiata
atatggcttcaggaaacgttgatccagatcaatgggaattcgcaaatgaagattttctccggggacaaaggaatttgttgaaaaatattcacagacgcaagcctatgcacagtcattctcagaatccccaacaaggcgtatgtaatgatgctataaaatatgaactggaggaggaaattcagaggctcaagagggataagggtctgctcatgatggagcttgttagaattaggcagcaacatcaaggtaccgagatgcatatgcagaccttggaggagcgtttgcaagccatggaacaccgccaacagcaaatgatggcatttctggccaaagctgtacagaagcctggatttgtggcacagcttgtgcaacagagtgaaaacaataagcttcttgaagcagctaataagaagagaagattacccaagcaagagaactgttcagaggctggggaaactgagttgacagacagtcagattgtgaagtatcaacctgcttcaggtgatgaatgtagtgc

SEQ ID NO: 475 - DNA, 337 bp, Pinus radiata
gttgctgctgcttctgcttctgcttctggtactgctgttgctgcgtctttgccagtgaacggtgctgctggggtcagatctagtgttgattcggagcattcggatatagaggcgtcttttaaagaggccgaatgcagtcaggccattgttgaaaggaggcctcggaaacggggcaggaagcctgccaatggtagagaagaacctctgaatcatgtagaagctgaaaggcagaggcgagagaagttgaaccagaggttttacgcactccgcgctgtggttcccaatgtgtccaagatggataaggcctctctgttgggtgatgccatttcttacatta

SEQ ID NO: 476 - DNA, 362 bp, Pinus radiata
caatatcatatcccaactcacgaaatagacaatctctttttatgatggtcaatgataaagaaaagtaatggtagattctcgtaaccaataaccttttaatagctgccaatgagtccaaattcattctgtcgatgcaatattgactgtatgcagaagaatcgagcactgtcacgcatctccaataccagcaaagtattcttgagaatgacttgaggtcgaaactgaaggataatctccaacagccacagaattctgggaagaagagacgctatagaggcgtaaggcaaagaccgtggggcaaatgggccgctgagattcgagatccaaaaaaagcagctcgagtatggctgggcacctttgac

SEQ ID NO: 477 - DNA, 612 bp, Pinus radiata
agaacatggccaagcacactgtctgcgcctcttttctcaacgaaggagacttcatttgccctccttacgaagatggaattggtctagaatggctgtcggacttcgtggaggattcctttgcagctacaggaagttcgaattctggttccttggctgacttgtctaaggacaaaatcgacgacaacagggagaagaagaagcagaacccaaccgatgaagcgataatccctgaaataccgcctataaaggagactcccaggtcacagagggcggtgcccgggcgggctcgcagcaagcggcgcagaagctcaggagccccaattcgcggttggtctacttctgaagattacgcattgcagaatgagggcggcatgaaaactgtaacaggagcggacgctataaatcattaccagtcctcggcgccccagcagcagccaaggcgctgcactcattgtctcagccagcgaaccccgcagtggcgattgggcccgttgggtcccaagaccctgtgcaatgcctgcggtgtgaggttcaagtctggcaggctcttccccgaatacaggcctgccaagagccccactttcattcgatacattcattcaaattcccata

SEQ ID NO: 478 - DNA, 680 bp, Pinus radiata
tggaaatgctgccaggcgtcctcatgatgtgcttttgaagttagaaaagttgagttcacagacaacgcttgaatcactacaaagactcatcgttcaaaagaaatgtctcctttttggcaaaaaggtaggaataagaattgacggaaagaagaccgcaaatacagaaaaagtgaatgaacggaacacaataccaaggatcatttttggggcattaacatttacaagaaaccgccctcatgcattatctaaaaatggaagcatagccgacacaagaagaaatatatgtggtgcacctcaagaggatggaaccatttgtacagctatccctcttaaaagcagaaaacggtgtcctgatcacaagggacaaaaaggccagaaagagaaaaatttatcaaaaattaacatcagtgcaaacgttgaatcaaggaaccaaggagttggggaacatgaaaatgaatatagatattgtggagtccttcttaaagatggatcaacatgcaagattatacccgataagggcagaaagcggtgtaatatccacaaggggatgcgcattcctggccaggcaaaataagcatttttatctggatcagaaagtgttaatgttccagaaatcagatgttagagtgcagaagagaaattacctactcctaaggaatgtaatcatactctaggttggc

SEQ ID NO: 479 - DNA, 544 bp, Pinus radiata
gttttatattttaagtggaaaatagcttggctggctagggtttcagtatataaaaccctggttgtttgaggggcgtaatacactcagttgatgttctagcgcatagatatatacacagactgtgagctttattctctgtgaacattctgggcaatgctactgagtctcagaccgcggaattaatacagatggcgctgaaggagaaactcctatcataaatatataaaaaggatttgtttttgacagtggaacagagccagttcaaagcaggcggcaatggcaacttccaatccgtttgatctgctcggcgatgacgacaatggcgatgtctcgcagctcgtcttcgtccctcaggagaagccgactgttaaaaaggcctctcagcctgctcaaacggcaacggccaagctcccgtccaaacccctacctccggctcaggctgtgagagagtcgagaaatggagtgggcagaggaggtcgaggcgggcgaggaggagaccgcaatcaagatgtgggctattagcaatcgtggccgtggcagcttc

SEQ ID NO: 480 - DNA, 971 bp, Pinus radiata
ggaagttctaggtcacacaccggagactcttgagaagtcttcagacaaggtgtggagaggtaaaggagtgcctggtgcgggacaggaacgcctctgcaagatgaatagggagaagcttatgaagatggctggtgctgttcgcactggtgggaagggtaccatgcgcagaaagaagaagacgattcacaggacaacaactacagatgacaagaaacttcaaagtactttgaaaaggataggagtgaatgcaatacctgctattgaagaggtcaatattttcctggaggattctgttattcattttcaaaatccaaaagttcaagcttcaattgctgctaatacgtgggtggtcagtggatctccacaaacaaagagacttcaagatcttcttccagggattatcaatcaacttgggccagacagttttgccaacctaaggaagcttgcacagcaatttcagaaagaagttcctcatcctgctgttgaagaagatgacgatgatgtgccagaacttgttgaaggagagacatttgaggaagcagctaagcaagaatccgctgcctaactgagttgagcttttataaacgattgacagttaagggagcactcaataatgtgttttgaatgtgatattagttataagtatattgtattttactgttaaagtaaaactatcaggggcatcttgttattatgatacagttcaaattttgtttttcctttccccttgtctcataaatttttcttcatgcaagtggattcctgtgaatgcaagattggtttgaattatgcaaattatagatttgtttttgacttcgattctgttatggtaaggtcttttcccccctccagtgtatggttaaaatgttgtagtacaaacaatgtccccaattagctgcttcttgcttggaattgtgcatgcgttgcaccttttggtattaaaatttttgcttgtctataaaaaaaaaaaa

SEQ ID NO: 481 - DNA, 710 bp, Pinus radiata
cttggagctgcctgctgaagtctttgatcgctgtaagtctgaggttgagattaatcaggggcttggcagatttggtatcaggtagaagctagagggtctctagtaatcgactctgcgcagtcccagagagaaatgaaaatgaatctcgaccttttgtagaagagtttcctatatctgaccccggatcgaggctatagcgaatgaggaaaatgagcggcccgagttcaatagcctgtttgccagagttgatagttccaaggatccgttggcgatgatttctattctccccgcgtagtcggtgaacttatcattgatcccatggagaacaaaacagatcaaatagtagccgggcagaaacgacgcagagatgaactgcagatgaccacactggcaacgcattgcttcaaggtggacgatattgcttgccagacttttcctgtttcatcctctgaaggtgaatgaacaataccctcaatcttgtatcgcattgttgatgttatgtagaagtaccaagcataaccatgccacaccaacaccagcaccaggaacgttttccttcacaagagggaattagctggaagagagatgatgaactcccacagccacagaatccaccaaaaaagaaacgttatagaggggtaaggcaaagaccgtggggaaaatgggccgcagagattcgtgatcctaagaaggcagctcgagtatggttg

SEQ ID NO: 482 - DNA, 1240 bp, Pinus radiata
attcccaggcctggttaaggagggcgggggttacatcagtgcaggtgggtttgatagaagcggcggagacggcttttgggagaggatattagctggccgctgtaaaaagttagtggtggttatggcttatgctgaaaatttgaggaattttggttttggggccaataatggtggttctaatcagagcaatagcagtaatgggggtgtagatggctattcttcgatgtccaatgagggagggcttgttatgggacagattggcggtccacatggctacccgaattcttcaccaagtgctcaagatgcgctatacgaggagctgtggcatgcctgtgctggacctcttgttacgctgcccaggatcggggagcgggtgttttatttcccacaaggtcatatggagcaggttgaagcatccacaaaccagggggctgatcagcacatgccattgtttaacctgccctataagatcctttgccgcgtaatcaatgttcaactgaaggctgaacctgatacagatgaagtgttttctcaaattaccttgctcccagaggcagagcaggatgagtcgtctgttgagaaggagcctctaaccccactgcctccaaagcctttagtatactctttctgtaagaccctcactgcatcagataccagtacccatggagggttttctgttctcaggagacatgctgatgaatgtcttccacctctggatatgagtcagcaacctccatctcaagatctggtggccaaggacttgcatggagttgaatggcggttccgacatatctttcgcggtcagccaaggaggcatttgcttaccactggctggagtgtctttgttagttctaaaagacttgtggcaggagatgcatttatctttttgaggggtgaaaatggtgaactgcgtgtgggagttaggcgtgccatgcgccagcaaaacaatgttccatcatctgttatatccagtcacagcatgcatcttggtgtcattgcaactgcatcacatgcagttacaacgaagaccatgtttagtgtctattataaaccaaggacaagcccatcagagttcataattccttatgatcaatatatggagtcaatgaaaatcaatttctcggttggaatgagattcaagatgaagtttgagggggaagaagtcccagagcaaagatttactggaaccattgttggaataagtgatgctgatcctgtgaactggccgaattcaaagtgg

SEQ ID NO: 483 - DNA, 516 bp, Pinus radiata
ttcagatctataaatcaatgtctgcattaatgacaaactaagttgaaattcccaaatgttggtggttactatttaggatcggacattaggcgttgtggtctcgggttcgattcacaaggcatttctgtttcggaatttcaaagcaacacgtatcagaaaactgattctatactgtgatgacgcaggctactaactacacagcaggtaccatcagagacgatcaagaggagcaatgtgtgaggaggggaccttggactgttgatgaggacatgagccttattcgatgcgtaaccacccggggtgaaggtcgatggaacacagtagccaaatttgcagggctaaagagaacaggaaagagctgcagattgagatggcttaattatcttcggcccgatgttaaacgtggaaacataacgccggaagagcagctattaatccttgaactccaccgtctctggggtaacagatggtccaagattgcacggcaactcccaggcaggactgacaacgaaatca

SEQ ID NO: 484 - DNA, 328 bp, Pinus radiata
ggggaatgattcctggccgaggccattcgagcgccatacacattgcggcggactgcgggaagtattgttttcagtaattcccttaattgggtcccagaatacgttctcagatccgaaaacggttcagtccatcggaggttacagcgattcgaaggcctgaaaaccctaaaaatacctatccccctttgtctttgaatggcggagaactatggcagcccggatagcagcccccggtcggagaacgaatccggcggcggtcacatgggcggcagcgatttctctgtgaaagagcaggatcggttcctgcctatagccaacgtggggcgca

SEQ ID NO: 485 - DNA, 919 bp, Pinus radiata
gtcatccatattttctttttcagtctgcaatacaaattgttattcgagatacgattgatcatgcttgaaggctatgcctatgcttgcggaaacataccgtgacagctttgagacgacttcgggaggtagcagcgtggatctggtaggaatggctctaccaggtttggcccctaatttgtcttctgcttcagtttcagcttcagcgtcggaagattctgccaagaaaataaggaaaccctataccatcaccaagtccagagagagctggtctgagcaagagcacgataaatttctcgaagcccttcaactatttgatcgtgattggaaaaagattgaagcttttgtaggatcaaagactgtcatacagattcggagtcatgcacaaaagtacttcttgaaggtccaaaagaatggcacaagagaacatgtaccacctcctcgtccaaaacgcaaagcatctcatccatacccacagaaggcctcaaaaaatgttcctgtgtcacagcaagtatcaactgcttttccaactgctgctactcaactagattctggatattatccaagggcagagtcgtcttccatactcaccaaatctggctcgtcatgcccaactgtttcttcctgggttcatcataccataccatcaatagatgcttcgtttgtggaaaaagatgatggtgggcctccaggcattgaaacagggaataattgcagtagtggtagcactgagagttctcctcctacgtggccaccctgttctgaaatccctgagaaagtcaaaccagatttttcacaagtttataagttcattggcagtgtctttgacccgagcacaactgatcacttgaagaagcttaaggaatggatccaattgatcttgaaactgtgttgtacccatgaggaacctttccacaacttg

SEQ ID NO: 486 - DNA, 359 bp, Pinus radiata
tctgtaagtgcttgagggcttcttgtatcgatgaggccattaacgatgggaagatcttttagttgttggagctgttcaaaagataatggccacgagcgtcttaatcgtggatcttggagtgctgaggaggatacaattttgagtgaacatatcaaaactcatggagttggtcgatggacatctcttcccaagaaagcaggtctaaaacgatctgggaagagttgcagattacgttggtttaactatcttcgttcagatatcaagcatggaaacatttctccggaagaagaggaactcctcatcagattacatcgtctccttggcaatcgttggtcgttgatagcaggacgacttccagg

SEQ ID NO: 487 - DNA, 438 bp, Pinus radiata
gtagggttttaaggaagaaagacgatccaagcagtgggtttttatcgagctcccacgcagtttgaagggtgtcgcagcagaagaagatcggattcgttcatcctcatcacaaagaatataccatgggggtcattacccatgtaaaagaaaagtaagagatggatcgggataagcttatgaagatggctggtgcagttcgtactggtggaaagggtacagtacgcagaaagaagaaagcagttcacagagccacaacaacagatgacaaaaggctccaaagtaccttgaagaggttaggagtgaatactattcctgctattgaagaagtaaatattttcaaggatgagatggtcattcattttataaacccaaaagttcaagcctctattaatgccaatacatgggtggtcagtggatctccccagacaaaaaatttac

SEQ ID NO: 488 - DNA, 478 bp, Pinus radiata
agaatttaggtagggttttaaggaagaaagacgatccaagcagtgggtttttatcgagctcccacgcagtttgaagggtgtcgcagcagaagaagatcggattcgttcatcctcatcacaaaagatggatcgggataagcttatgaagatggctggtgcagttcgtactggtggaaagggtacagtacgcagaaagaagaaagcagttcacagagccacaacaacagatgacaaaaggctccaaagtaccttgaagaggttaggagtgaatactattcctgctattgaagaagtaaatattttcaaggatgagatggtcattcattttataaacccaaaagttcaagcctctattaatgccaatacatgggtggtcagtggatctccccagacaaaaaatttacaagatctccttcccggaatcatcaatcagcttggacctgataatttgattaatttgaagaagattgcccaacag

SEQ ID NO: 489 - DNA, 608 bp, Pinus radiata
tgacgacgaagaagaagcttctctgaagggcaaggtgcggtggggactagattcgatagcggctctgggtttaaagttctgaattaaacgggctttggctaaaaagtaaaaaacggttggaatttgagcaggaggagctgatagagtgttattatcgggacggatgaaataattgaagccaaaggggcttatgtgtgtgttttgcggacttctgcgagtaaggggaaatggaattattggagtgaagtaggtgttcttggagaaatatgcgggcagctcataataacagcaataatagtgagaaatcttgcgtgttgagatctctctgagcttcgcttttcagaatgaggaccggcttctcccagcagcatcgggaaggggaaaagaggagtctcaattcagagctatggcatgcatgtgctgggccacttgtgtccctacctgctgttgggagccgtgttgtatattttcctcaaggtcacagtgagcaggtggctgcctcaacaaacaagaggttgatgctcacattcctaactatccaaatcttccaccacaattaatctgccactacacaatgttactctgcaggcagatgtggagacagatga

SEQ ID NO: 490 - DNA, 331 bp, Pinus radiata
ttgaattcttgtcttccccccagctgaggctctctgagaccaaggtgagattcagccagtagtaagctatagattgatagttcagagaaaagactgaaaggcaaaaactatatagacataacaacggagagagcagcacaggaaccaggttgcataatggctaggcctcaaagatacagaggagtccgtcagaggcactggggatcatgggtctctgaaatccgccatcccttattgaagaccagaatatggctaggaacatttgaaacagcagaggatgcagcacgagcatatgatgaagctgcaaggatgatgtgtgggccgagagcta

SEQ ID NO: 491 - DNA, 431 bp, Pinus radiata
ccgctatcctttccattacatcccacgttaggtcacggtttcgaacccttgcacggccattcttctgttaagatggtgagatctccctgctgcgacaaggttcataccaataacaaaggcgcctggaccaaagaagaagacgagcgtctcatagcacacattgaagcccacggcgagggctcatggcgttctcttcccaaggccgcagggctgctgcgatgtgggaagagctgcaggttgcgatggataaactacctgcgtcctgatctgaaacgcggaagcttttcagaagaagaagacgatctcatcatcaaactccactccctcctcggcaacaagtggtcgcttattgcagggagattgcagggcgaacggacaacgaaaataaaaaattactggaacacgcacatgaaaaggaaattgttgagcag

SEQ ID NO: 492 - DNA, 469 bp, Pinus radiata
gccagagctgtggctgttcccagaagaggatatcatcagctgtccagtttgtcctaagagactacagaagaagaatatagaagatgggtagatccccttgccccccaaaagaagcgcttaaccgtggggcttggacaggcatggaggatacgattctcaccgagtacattcgagttcatggcagtggtggctggaaagatatctccaaaagagcaggtcttaagaggtgtgcaaagagttgcagattgcgttggctgaactatcttcgtcccgatattaaacgtggtaacatttctcccgaggaagaagagctcattattcggttgcatcgccttcttggaaatcggtggtctctgatagcaggacgactgcctggtcgaacagacaacgaaatcaagaattactggaacactcatatgagcaagaagccatggctgtcaatggacgaatctcagtccaatacttcgca

SEQ ID NO: 493 - DNA, 380 bp, Pinus radiata
gaggaggaggacgaggaggaggctgggaaggagctggaggcgtgggagagagcatacgctgacgaaaggtcatgggaaaccttgcaggaggacgaggagggtcttctcaactttgacaagaaacagcagcaacagcaacagcgccaatacagacgccgtctgcagtctgctgcagccgcggcttcaaacattcagcgaggattgatccgttatctctacatcatcatcgacttctctcgggcggcagcagagaaggatttcaaaccaaatcgaatggtggtggttgcaaattgtgtcgaggcatttgtgagagaattctttgatcagaatccactaagtcagctgggtattgttattataaaaaatggcgttgcacatcg

SEQ ID NO: 494 - DNA, 420 bp, Pinus radiata
gtcgagctccttgctgcgagaaaacccatacaaacaaaggcgcctggagtaaagatgaagatgaagcactcgttgcatatattcaagcccatggagaaggcagttggcgttcccttcccaaggccgctgggttgcagcggtgtggcaaaagctgcaggcttagatggataaattatctccgtcctgacctcaaacggggcaatttcagcccagaagaagatgagatcattatcaaacttcattctatgttgggtaacaagtggtctttgatcgcaagcaaattgccagggcgaacagataatgagataaagaattactggaacactcacattaagagaaaaatgttagaaaggggtctagatccttctacccatctccctttaatgtcagaccatggctcttttgagtcctccagcaaga

SEQ ID NO: 495 - DNA, 568 bp, Pinus radiata
aaaagttgttcctccactggatttcactcagcagccacctgcccaggagctgactgccagggatcttcatgacaatgaatggaaatttcggcatatttttcggggtcagcctaagaggcatctgctcacaacaggatggagtgtttttgtcagtgcgaagagacttgcagctggtgattctgtgctctttatttggaatgagaaaggacaactgttgttgggaattagacgagcaaacaggccacaggctgtaatgccctcattggtactctcgagtgatagcatgcatatagggctccttgctgcggctgctcatgctgctgctacaaatagtcgatttactattttctataatccaagggcaagtccatctgaatttgtcatacctctggcaaagtatgttaaagcagtttatcatactcgtgtttctataggaatgcgttttagaatgctatttgagacagaagagtcgagtgttcgcagatatatgggcaccataactggcataagtgacttggatcaggttcgatggccaaattcacattggcgttctgttaaggttggttgg

SEQ ID NO: 496 - DNA, 396 bp, Pinus radiata
tgggagtttgctaatgattgtttccggaaaggagaaaagcagctgctctgcgaaattcatagaagaaaaagcgtccagcaatcttcagcagcccctgctagcagatgcgtttcgccggtcaattctgtggaagagcaggcattgtcttcgacctcctcccctgtttcttctcacgcagaggcggcgttagttaattgtggtcaaaatagcacatccgggctccatggtgaaaatgaaaaactcagaaaagataatttgcttctcatgtcagagctggcacaaatgaagaaacagtgcaacgatctcctcctgtttctgtcaaagtgtgtaaacattaccccggacaacctcagcaatatcctgatagccgcttctcaaacgaattgccgcgatgaa

SEQ ID NO: 497 - DNA, 643 bp, Pinus radiata
cggcaagtggggagtgccggacaatttgtatggagctcaggaagacagtggtggaagtagtgttaaacagaagaacttgaaggatggggaccaattcaccagtagtgatgaagctgacagtgaggtcaatgaattcaacattatgaaaagaagcaattcaggggttggatatgaagataacaaaagaagtggggggcaaggtgatggcaatcagtacaggtcacgtcactctcggagcatctccatggatagcattatgagtaagatgcataacttcagtgaagacttggaacaggaaccgtctcaaggtcggaatgtcagacactcccatagcaattcgatggatggaagtacaaatttcaatgtggaattcgggaatggggaattcagtgcatctgagatgaagaagatcatggccagtgagaaactggcagagcttgcaacggtggatccaaaacgtgtcaaaaggatattggctaatcgccagtcggctgcacgctccaaggaaagaaagatgcgctatatctcagagctggaacgcaaagtccagaccttgcaaactgaggcaacaactttgtccgcacagctgactcttttgcagagggatcaactggactgggcagtcagaaccacgagctcaagt

SEQ ID NO: 498 - DNA, 328 bp, Pinus radiata
aaaatctgtacctagagcccagcaatatccttcgcaatggctgacggccaccagttcaacaatattttgcttgtaggtcgaggcggcacgaatccgggtcaactgaggatacattctggaggtatagtgtggagaaggcagggtggaggcaaggtggttgatgtggcgaaaaacgaagtcaagagtttgagttggactcgagttcccaggggttatcaactcggtgtcaagcttaaagctgggttgaacatcaagcttgcgggatttcgtgaacaggatgtcggcaatttgacaaatttcatgacaaacacaataggattagctccca

SEQ ID NO: 499 - DNA, 372 bp, Pinus radiata
gttgtattgtattgcaagtgaggaaatttaggaggtgtggcgtaaaatgggagaccacagtggtggagagagcagtcctcattctgacatagagtctaccggcatccacaataatggatcttcttcttcctcacaatccatcatacgagagcaagaccggctgcttcccatagccaatgtggggcgcatcatgaagaaaaccctcccaaccaacgccaagatctccaaggaagccaaggaaatcatgcaagaatgcgtctccgagttcattagctttgttactggagaagcatccgacaagtgtcacaaggaaaagcgcaagaccatcaacggcgatgacatactatgggccatgaccactctcggattcga

SEQ ID NO: 500 - DNA, 344 bp, Pinus radiata
ccgcaacattcaacgtaatgaatatcataatcttttcaacttcatcagttccaagggattgaaaataatgaacttaggagatgcacatggcaccagtggagttgctgccgttctcgagaattcggatgatgaagctgtggatccacatcttgaacgtatcaaaagtgcacgtgaaggcggtgctggagaagatagtgatgaagaggcatgctacactggggacttatctctgatatgtgctgtagtcaaagaactaatatgcacacatgattaacaagagttaaatcaagagactgatgtctgtttctgttttgtttgtgtgcaggatgaggattttgttgcag

SEQ ID NO: 501 - DNA, 462 bp, Pinus radiata
gggaggcagagaaggaacggaaaaaggagtgaatttttgtgggtttgtgtttattgggaagatggggtgtgtgtcgtccaaggtggagaatgaagaattagtgaaaagatgcagggacaggaggaggctaatgaagcaggcagtgaattccaggcacaattttgctgcagcccacattgcttatttgagggctctgcaaaacacagggaatgctctggtacaatttgcggagggggaatccagtgctatgaatggcaatgctattgaagaagcggccacaccaatgccagcgaccccattaacagcatctcatcgccatcccatgaaattccatcctcctcctccgcctccgccgccgccattggtgcctagcagcccctccgtgagtcccagcatggagagctttcgtatgccatccaaacacaatcccctcagtaggtctacttcagacattagctatgt

SEQ ID NO: 502 - DNA, 504 bp, Pinus radiata
tatgtctctgcatttcagccagtccatggtttcaagttagttagtccaataaagcagagatgggtcgtgctccatgctgcacaaaagttggtctcaacaagggagcatggtctgccgaagaggatagtcttctgggaagatatattcaaactcatggtgaaggcaattggaggtctctgcccaagaaagcagggctgcgaagatgtggaaagagctgcagattgcgttggctaaactatcttcggccatgtatcaagcggggaaatattacaacagatgaagaagaacttattatcagaatgcatgctctcttgggcaaccgatggtcgataatagcagggagagtccccggccgaacagacaacgaaataaagaactactggaacactaacttgagcaagaaacttgctgtcaggggaatcgatcccaagactcataaaaaaatcacgacggacggcacgaacagagtcaacggtgatcgtttcagccagaggaaaggtgaga

SEQ ID NO: 503 - DNA, 416 bp, Pinus radiata
acggcaactcattcgtgaactagaacagatgtttaacattgaaggagaacttgaggatccaagcaaaggttggcaggttgtatacactgacaatgaaggggatatgatgcttgttggagatgatccatggcaagagttctgtagcattgtgcggaaaatttacatttatacgcgtgaagaggttgaaaaaatgaccccacaaaccccaagtgcgaactcaagggatgttcagaagagcctgtcacaagaggaaacttcccggagttctgatcgtcaagattcatcaattgcgggggtcaccgctgaaaggagttctgatgcctgataccatttcaatctgcatgttggtcacttctgtcgggcctgctaaaggggcatcaaagggcatgttttagttggccgtttgatgccttggg

SEQ ID NO: 504 - DNA, 1206 bp, Pinus radiata
gccgaaactcgaatcgatatgctttgtggccggttcaaatatttgagctggcttagcttctctggttcagaaatggcggactaaagtaatagtgtgccccgaggtctggtgttcgaatctcgttggcgtgaaaggtcaaatttttctctcgagtttcattgattctgaaaaactggcatagctatggcgatgagcaatgggagattgtgtgaagatttggataggattaaggggccgtggagccccgaggaggacgcgtcgctgcagaggcttgttcagaaatacgggccgaggaactggaccctgataagtaaaggaatcccggggcgatccgggaaatcgtgcaggctacggtggtgcaatcagctgagccctcaggtggagcacagaccttttaccccgtccgaggatgctgctattctgcaggcccacgcgcagcacggcaacaaatgggcaacaattgcccgagccctccccggccgcaccgacaacgcgatcaagaaccactggaactccacgctacggaggcgctgccgggaccccaaaaagggcatcgttgtccacctggacgacgaaatcagcagcttagacgccgctcgcaagcggagcagcgacggcttctcccacgatggcagcagtgcgctggaggacaacggatgtagcagctgggaagtggactccaagcggctgaagagactaggagaactgggaacagagcagggccccgaggttgaagccgaggtcgaggtttcggaccggagcgacgccaacccgggacgcgtgctgtacaggcccgtgccggtcgtgtcttttttcagttcattcgggaaaaccgttgcgaatctacaggaaacggcggccggcgcagtcggtgtcgatccgccgacctcgctgagcctgtcgctgcccggactcgatcccgcgatcccctctccgaagctgtccactcaaaaggactctcacaacaatagcacagttaataacaatattcctattccgccggtggtgaatacatgagagcagacgaggcggtggtggagcgactcagcaccgccgtcaaggccacggtggcaagcatgctaacgcctgttctgaactcgtcgccacgtggctacaacccaccggctgtgagcagcgaccttctggcgctgatgcgggatatggttgcgaaagaagtgcagaaatatatgtccagtcatcaccagc

SEQ ID NO: 505 - DNA, 386 bp, Pinus radiata
gagaatttggtcgttcatctgaaaaaggacgaggatatggaaggggccgtggccgtggtggtcgtggaggatatggtaatgatgctggtgatgaaagtcagaggcctcggaggcagtatgaacgtcggagtggtactggacgaggctacgaggttaagagagaaggggctggtcaaggaaattggggtactcctacagatcagggattcacagaggaacctgaagagctgagtcgtgcagaggaagagaagactgtgacccctgagaaacaggaagaacagaaacccagtgaagagtccaatcaagaaatccctgcaccagagtctgaagagaagaaagaggaggaagaagacaaggatatgactcttgatgagtatgagaaagtg

SEQ ID NO: 506 - DNA, 408 bp, Pinus radiata
ggcagtgaatagcagtctctctgttggaatgaggttcaagatgcgttttgaaggagaagagtctcctgaacggaggtttactggtacaattattggcatgggtgaggttgataatgtgagatggccagaatcaaagtggagatcacttaaggtccagtgggatgaaacatcagtggtcccgcgaccagagagggtttcaccatgggaaattgagacgtttgtagcttcatctgcagcacttaatcctttgccagcaccaaggactaagaagcctcggcccaatttggtgtcctcatctcaggaattaatgatacatggatcgggcaaaacagcaacagattcttcacaggtacacagattgccaagggtcttgcaaggtcaagaaatgaggacctttggaggatcctt

SEQ ID NO: 507 - DNA, 320 bp, Pinus radiata
gcaaagagttgcagattgcgttggctgaactatcttcgtcccgatattaaacgtggtaacatttctcccgaggaagaagagctcattattcggttgcatcgccttcttggaaatcggtatgtagagaatcgggggacatgatttattcatgcgccagaatttcacgattcctcatcgaattagtcatgcaatgtttgtgcaggtggtctctgatagcaggacgactgcctggtcgaacagacaacgaaatcaagaattactggaacactcatatgagcaagaagccatggctgtcaatggacgaatctcagtccaatact

SEQ ID NO: 508 - DNA, 395 bp, Pinus radiata
ccggtccgggcggtggagagcatcagccttggagttacagaccaggaaaatacaagatgggtagatctccttgctgctccaaagaggggctcaaccgcggggcctggaccaaaagggaggatatgattctctccgaatacgttcgaattcatggcgatggtggatggagaaatcttccggaaaaagcaggtcttaagagatgtggaaagagttgcagactacgctggttgaactatcttcgtcccgatattaaacgcggaaacatttgccccgccgaggaggagcttattattcggctgcatcgccttcttggcaatcggtggtcactgatagcaggacgactgcctggtcgaacagacaacgaaatcaagaactactggaacactcatctgagc

SEQ ID NO: 509 - DNA, 658 bp, Pinus radiata
gccatatctacatgaatctcgacatcttcatgcgatgaagagagcgagagggtgtggtggtcgctttctgaacaccaaaaagttagaggactcgaaagcaaatgtggataatggaaagacaccagaaggacatactgcgcaggctgggagttcttcaggttctgaagttctgcaatctgaaaatggaaatggaaattctacccaggagctacatggtgcttgtgggatgtcaggctcacaagttactagcattgcacagtcatctgaaaatggtacaacttatcaatattctcatactaatggagcatatcttaaccactatcaacatccacatttccatatatcagcttttcacccgctctcaagtggaggcgaggaaggcagcagtgcaaaaggtgggagcataatatctggtggatcacaacaacgagttgttgtgatccagtgaagtgtgaaataagatgttagtggtgagaatctcacgtgcttggttctccgtgtcacattgactataaagataggtctcaatgagtgcgaagatcataaaatgaaacagattttataaagtcttcgcaattttatggttcagaggccattatcagtaaaacaggcaacccgtgatggtttgtttttgaatgggttgcagtttgcacaaaca

SEQ ID NO: 510 - DNA, 351 bp, Pinus radiata
cacgagggccagagctgtggctgttcccagaagaggatatcatcagctgtccagtttgtcctaagagactacagaagaagaatatagaagatgggtagatccccttgccccccaaaagaagcgcttaaccgtggggcttggacaggcatggaggatacgattctcaccgagtacattcgagttcatggcagtggtggctggaaagctatctccaaaagagcaggtgagtgtcaataaaaatttaatagcaattctttttattagcagaaggaagtagcaatctcccaggttatatataacaattcatcagtcatatatatcagaaatttatagtcgagtctaagagggaga

SEQ ID NO: 511 - DNA, 754 bp, Pinus radiata
gttacacggcctgggaaattccgtagttgtcaagatggttatgctgtgagggcttccctcaaggctgaagatggagtgttatatcctcttgaaaaaagctttttcttcttgcctaaacccccgacacttattcttcacgaggagattgaatatcttgagtttgagagacatggagctgctggtacgagtagtatgtcttcacactattttgatcttattataaagctgaagagtgagcaagagcatcagttccgaaatattcagaggaatgaatatcacaatcttttcagcttcataaacaccaagggtttaaaaatcatcaatttaggagctacagaaactattggtggagttgcagcggctcttcagaattctgacgatgaagctgtagatccacatcttgagcgaataaaaatctacgtgatggtggagctggtgctgaagacagcgacgaagaggatgaagactttgttgcagaaaacgatgatgctggatctccaacagatgagtcagaagaagagggatcagatgcaagtgagagtgcagaggtcaagcaacctgcaaagaaagaagtaaagaaaaaaaaggcggtggctcccaaggcaaccgagaccaagaagaagaagaagggatgacgaggaagagggaggaaagaaaaagcagcggcgaaagaagaaggatccaaatgcgccaaagaaagccatgacttggttttgtccttttctcaagtgaaagagagatctgaaaaagagtg

SEQ ID NO: 512 - DNA, 424 bp, Pinus radiata
cttcctggtgttgttgctgtgatttctctgccattctgtgttgggtttatggttttagcttcactacaagcctttagcaagcctcacaaataagctttgcagtaggatgtctcctcccccgtcatattccatgtttcccaattcaggaatgggcttaaatccctcagtgacatcttcagaaccctctagtcaggtctccggatcgatcccccatcaatattcaggctccgaggaagaccctaaactgacgatcgatgaaagaaagcagaagagaatgctttctaacagagaatctgcaaggaggtccaggatgagaaagcaacagcatttggatgaattgagagcccgaacagctcatctcagagcagagaacagtcatatgctaacaaaattcaacattgcttcacagaaatacatgcagctg

SEQ ID NO: 513 - DNA, 487 bp, Pinus radiata
cgaggtcagccgagaaggcacttgttaacaacaggctggagtgtctttgttagcgcaaaaagactagttgcaggcgatgcatttatttttctgaggggtgaaaattcagaattgcgggtgggggtgaggcgagttatgagacagcaaagtaatatgccatcatcagtcatatctagtcacagcatgcatttaggtgtcattgctactgcatctcatgcagttacaactcggaccatgtttactgtttattataaaccaaggacaagccaatcagagttcattattccttatgataaatatatggaggctgtgaatagcaacctttcagttggaatgaggtttaagatgaggttcgagggtgaggaggccccagaaaggaggtttactggaactataattggaataggtgacgttgatccttccagatggccatcttcaaagtggagatctctgaaggtgcaatgggatgaaacctgtgcaattccac

SEQ ID NO: 514 - DNA, 648 bp, Pinus radiata
gttttcccgaaatatgggacgttcaaggtttccaacaaactgctatgttctctcagccctttctctttttcctgcggctcgagcgtgaggtcgatgtattcattcctgttaaattttcttttgttctcttttccattttcgatgcctctgtcgagttcttttttctgagatttttgcagtcttcgaaggtttgagtttggcctcagccttggaagtatctcttttggtcttaggtaatggaattgtaaccttcccgaacaacggcggtagtggtctggagattcgcatgtacgaagataaaatggcgcaatctgaggaacagcctaatgaagccacggttcctcgccctgctgattctcatagatctataccaacgccgtttctcatgaaaacctaccggcttgtcgacgatccgagcttgaacgacattatttcatggaacgaagacggcactacgttcatcgtttggcggcctgcggaattcgcccgtgatttgctgccgaattactttaaacacaacaatttctccagttttgtccggcagctgaatacatacggatttcgaaagattgtgccagacagatgggagttcgccaacgagttttttcgcagaggagaaaagaaattgctctgcgagattcatagaag

SEQ ID NO: 515 - DNA, 315 bp, Pinus radiata
tgcatttcagccagtccatggtttcaaggtcgaatctccttgctgacatgaatccatcaatatatatagagagagagaaatatacgtttttcagatttaagcatggccgtttaataatctgcattgcatggcgagattgtatttgtgttagaagttgattttctgttttttctctttcagttagttagtccaataaagcagagatgggtcgtgctccatgctgcacaaaagttggtctcaacaagggagcatggtctgccgaagaggatagtcttctgggaagatatattcaaactcatggtgaaggcaattgga

SEQ ID NO: 516 - DNA, 563 bp, Pinus radiata
gacacgtagtggatcaaagaattcggcacgagctcctgtctctgggttctctatgaattctaacatgggtgtgtctggaggtctagatgaaagtgggttttcacagcctccaccaaattttgcaaagatgaatgctcccacgagaacattcactaaggtttacaagctaggttctgttgggaggtcagtggatgtaacacgtttcaggggctatccagatctgcgtgccgagcttgaccgtatgtttggtctagaaggccagctggagaacccaagatcaagctggcagcttgtatttgttgacaaggagaaggatgttcttctccttggggatgatccttgggaggagtttgtcaataatgttcgatttattaagatactctctcctccagaagtgcagcagatgagtcaggaagatatggagttttggagttccattccaactcagcagcagacaagcagtagttcagacgactgtgtagctagaaattcttctcgcaacatcagatcagttctcacatcgcctggctccctggacgtattaagtgtagatccaattgtac

SEQ ID NO: 517 - DNA, 392 bp, Pinus radiata
ttcatgacaatgagtggaaatttcggcatatttatcggggtcagcccaagcggcatctgctgacaacaggatggagtgtatttgttagtgcaaagagactcagtgctggtgatgctgtgctttttattaggaatgagaaaggacagttattgctgggaatcaggcgagcaaaccgatcccaaacggttatgccatcatcagtgctgtccagtgatagcatgcacataggtgttcttgcggctgcagctcatgctgcttcaacaaactgccgcttcactattttctacaatccaagggcaagtccatcagaatttgtcataccattgtctaagtatgaaaaggcagtttatcacacacgagtttcaattggaatgcgcttccggatgctgttt

SEQ ID NO: 518 - DNA, 319 bp, Pinus radiata
tttaagcatttcattgagtcttaggtcacggtttccaatcctggcaggtctcattattctgtctctctggcaagatggggagaactccctgctgtgaaaaaggtcatacaaacaaaggcgcgtggaccaaagaagaggacgatcgcctcatcgctcacattcgagcccacggcgaaggccgctggcgttcgcttcccaaggccgcagggctgatgcgatgcgggaagagttgcaggctccgatggataaactacttgcgtccacatctcaagcgtggaaacttctcagaagaagaagatgagttcatcatcaaactcca

SEQ ID NO: 519 - DNA, 513 bp, Pinus radiata
accgtcgagagagcttcatatctaaccaatacataacacctgtatggcttcatagcttcacagcaacagggcaccatgggccgagctccttgctgggataaaatgggagtaaagaaaggcgcctggactctagacgaagataaaatactcgtcgattacattaccaaacatggccatggcaactggcgcgcactgcccaagcaagcagggctcctgcgatgtggaaagagttgtcgcctgcggtggacgaactacctgaaacccgacatcaaaagagggaattttagtccagaagaggaagatcaaattattaaattgcatgagctcatagggaatagatggtccactattgcttcgtacttgccaggaagaaccgacaatgagatcaagaacgtgtggaacacccatttaaagaaacgtctcgcgcgtatgaaagccgactcggttgcagtcgacgcacagccaacgcctgcgtcttccctggcctcatccactacagaaatgacgtgccac

SEQ ID NO: 520 - DNA, 219 bp, Pinus radiata
gtgcattgaagccaatggcggaggggctcctggacgctcgcttcccaaggccgcagggctgcagcgatgcgggaagagctgcaggctgcgatggataaattacctgcgtcccgatgatgtcaagcgtggaaatttcacagaagaagaagacgatcttataatcaaactgcactcactcctcggcaacaagtggtctctaattgcagggagattgccagg

SEQ ID NO: 521 - DNA, 392 bp, Pinus radiata
cttagcgacggttcccaatccctagtccctgcactttactcgtctctctgtgaagatgaggagattgcgctgtgagaagggtaatacaaacaaaggggcgtggacccaacaagaagatgcccgactcatcgcctacattcgagcccacggcgaaggcggctggcattcccttcccagggccgcaggtctgctgcgatgtgggaagagttgcaggctgcgatggataaattacctgcgtcctaatctgaagcgtggaaacttctctgaagaagaggacgatctcataatcaaactccacaacctcttgggcgataagtggtctcttatcgcgggtcgattgccgggccggatggaagaccagataaagaactattgggatacccactttaaga

SEQ ID NO: 522 - DNA, 447 bp, Pinus radiata
aggaaaggaggttcatattgctgagcctgaccaggtttcagatccaccaaaggcaatcaaatatgagccacctgcagtaagctgtgatcaggagaaacctttgcaaaagttatcaaaagaaactcaagtcaaacagcacggcaaccccaccaggagctgtactaaggtgcataagcaggggatagctcttggaagggccgttgaccttactaagtttgaaggttacgaggaattaatttgtgagcttgaacgcatgttcaacattgaaggagaactacggaatcctagcaaaggttggcaggttgtgtacacggataatgaaggagatatgatgcttgttggtgatgatccatggcaggagttctgtagcattgtgcgtaagattttcatctatacacgagaagaggttgagaaaatgactcctcaaaagcatgccaaactgcaagg

SEQ ID NO: 523 - DNA, 822 bp, Pinus radiata
tggaaacccaaagctccgataacaactacatggtcggctttgtcctggccaatgtcgtgggattgcagtactacacgggtaccatcaatggccgtgaaatgattcgactagttcgcgagcctgaaaatcggtacgaccccaacgccatcaaagttctcaacatgagcggccagcaggtcggtcacatcgagcgcgctgtggcgctggcactggcgtcccatgttgatcaatccctaattttaatcgaaggaatcgtgtccagggctctgcataaaggtgcttacaagttaccttgtcaaatctacattttcagtcacagggattcgatgggcatggtccttcagttgcttaaaggggccggattgaatgttattactgcggaggaccaagagtttttaacggcggaatccattgctgcaaaagaaatatatgaagatccaggggtgaaggaggttagaagggtcgatgatatctttgggtctcttaataatcccaagaagaggcagtcgatggaggcttgcgagcttgtaacttcgacactcttacagcaccagaaggaggcattggcttggatggtgcagagggagaattcttccgaacttccgccattttgggatgtttgtgacaagacgagtaagtcacagcagctcagatataaaaatgttttgacaaattttgagacgaatggaaggccgaagcctttgagaggtggaattttggcggatgatatggggcttggtaagacgctgtcattgctttcgctcattgcaacgaaccgtcccggtgccaagctccctcctgttgtagatattgctccctctt

SEQ ID NO: 524 - DNA, 390 bp, Pinus radiata
cttaattccgcaacacaatgcgttttcattggagttgagattttcagatcggcaattgccaagctcaacgcccccaaattgtgattcgatgtttccctcccactacacagcgttggcattgcgtcgccaaatgtggagaaaccccagagagtccggacagagccattcccagcctccagagaaagatagaggaaaaactttcggccaatttaagggaatccgaatgcgaaaatggggaaagtgggtgtccgaaattcggatgccgagatcgaaggagaggatctggctaggatcctataaaactgtcgagcaagccgcccgtgcttacgatgccgcactctattgcctcagaggaccaaacgccaaattcaatttccccaattccgtgcc

SEQ ID NO: 525 - DNA, 299 bp, Pinus radiata
cgagcaacagcgaagccgatttccaaagatggatagggagaaactcatgaagatggctggtgcagtccgcactggcggaaagggtacaatgcgaaggaaaaagaagacaattcataagactgccacggcagatgacaagagacttcaaagtaccttgaaaagaataggcgtgaataacatccctgctattgaagaagtcaatatttttaaggatgaccatgttattcattttgctaacccaaaggtccaggcttctattgctgccaacacatgggtgggtagtgggcatcgcaaacaaa

SEQ ID NO: 526 - DNA, 101 bp, Pinus radiata
gggaaagacccagatgaagttgaagcgagaacgcgaccagcaggcaagggacgcttcaaagcgccgcaacgggctgctgaagaaagcttacgagctctcgg

SEQ ID NO: 527 - DNA, 361 bp, Pinus radiata
atcgcttcggcccgagcaattttgcttctctgctaaacgatgggaagagcgccttgctgtgccaacggtgacagaagcaagggagcctggaccaaggaagaggatgacaggcttacccaatatattcaggctcatggagaaggatgctggcgttctctccccaaggccgcaggtctgcttcggtgtggaaaaagttgcaggctgagatggataaattatcttcgccctgatctgaaacgaggaggtttttctgaagatgaagacgatcttattctcaaactgcacgccctcctcggaaataagtggtctctgatagcgggtcgtttgcctggtcgaactggccaccaaaatcaaaactact

SEQ ID NO: 528 - DNA, 337 bp, Pinus radiata
cgtaagagcaatgttcattcattttgcaaaactcttactgcttctgatactagcactcatggaggattttctgttttacgaaggcatgctgatgaatgtcttccacctctggacatgagtcagcaacctccttcgcaagagctggtagccagagatttgcatggaatggaatggcgattccgccatatatttagaggccaaccacggaggcatttgctaaccactgggtggagtgtttttgtcagctcaaagagactggtagcaggagatgctttcatattcttgaggggtgaaagtggagaactgcgtgttggagtgaggcgtgctatgcgtcaga

SEQ ID NO: 529 - DNA, 491 bp, Pinus radiata
agcactccgagaagcaattaaaaatggtgcttgtccaaactgcggagggtctacatcgctgggagagatgcctggattcgacgaacaccatttccgtatagagaatacgcgcttaaaggaggagcttgatcgagtgtctggcattgccacaaaatatataggaagatcaatgccgcatttggcacccatagcaacaccacctatgctcatgtcctctcttgaactcgcaatggggagcttcggtgggaagcagtcacagcctgccgcgccctcggtcgattttatttcaggtccactggctgacgggcctataattaattgtggaaccttgacggatttagataaaccgttggcactggaacttgcaatgaacggtgtggaggagttgatccggatggcacaaactgatgagcctctctggttgaaggatgttaatgcgggcagcgtgaaagagctttttgaacttggatgagtatggcagatcgtttcct

SEQ ID NO: 530 - DNA, 350 bp, Pinus radiata
ggtttctttatatttatgtgcagattgcctggacggacacttgccaatggacgtctcatatggctgtgccaggccaacgaagcggacagcaaagtcttcccacgtgctcttcttgctaagagcgcctctattcagactgttgtatgcatccctctcgcggacggtgtcttggagtttggaactactgaagtggagcgagaagaccctggtctagtccaacgcaccataagcttttttttggagtaccccaaaccgatatgttcagagcaatctacatccagcccacagtgctcagacagagacgaaaaggatcaagtgggcatggtcacaataatgtcctccgacagcat

SEQ ID NO: 531 - DNA, 437 bp, Pinus radiata
ttcctgttcgattcactggatgccgtgaacatcaacatggaggccgtgcacaagatcgagaagttcctgctagctccgaagatcgacgccaccatttcctccgccgccgctccgccatggaagaccctgttcgccgccgccggcttctccccagtggccttcagcaacttcaccgagacgcaggcagagtacctgatccagcgcctccatagccgcgggttcgaagtcgagaaagcgcacgcggctctcctcctcgggtggcagggccgcccactggtctccgccactgcctggaggtgcgggcccccgccttaattaattaaattatcaaaaaccaatttagcagactaataacagaaataaacaaaatctctgtttttccttttttcttgttaattttcccgggtattttctgttaaacctgagctttgaaaaac

SEQ ID NO: 532 - DNA, 508 bp, Pinus radiata
gaagaaaaacaactttccataagtggacggaactggggagaagtgaatctagaaggaaacatgctcacatttttggttggttcgaaaccagcttttgaggtatccttggcagatgtatctcaaacacagctccaaggaaagaatgacgttgtcctagaattccatgtggatgatacaactggagccaatgagaaagattctctgatggaactgagcttccacattccaaactccaatacaacatttgctggggatgaggcgagccctccagcacagatttttcgagagaaaatcatgtcaatggcagatgtggggtcatcgggtggagaagcagttgcattgtttgaggacattgctatccttactccaagaggtcgttacactattgagctccatctatctttcatgcggcttcaagggcaggccagtgattttaaaattcaatacagcagtgttcttcgcctttttgttcttccaaagtcacctcacacacttgtggtgatcaccc

SEQ ID NO: 533 - DNA, 374 bp, Pinus radiata
tctaggtcattcacagaattttagtactgatgtcaataggatgccggatgttccaccccggagaggaggccatcgcagggctcagtcggaaattgcgtttcgcttgccggacgatatcatgtttgatggtgatcttggttttgctggttttgacatgcccacggtctctgatgacgcaactgaggccgaagatctgatttccatgtacatggatatggagaaattaacttcttttggagagccgttgaattctgcggcgggagaaggatcgaagctcccctcgggtgctgagactaatcgacctccgcatcattcaagaagtctttctgtcgatgctgtattttctggattcgaaggtaacatggaagatacga

SEQ ID NO: 534 - DNA, 487 bp, Pinus radiata
acgatcttcaccctcggtgcgctctctgcttatcccgattcccagccaactgctattatattcggagtactgtacttccagaactggtatcttcaagcaccaagaccattttctgagctgttaaagatactatgagtgatatggatcgttcatcatcagaagattcagtggattctcaaggtgatgtgaatgcaaactacaagatggttttctcggaagatgaaaaggatctcataagcaggctgtacaatctactgggccagaggtgggctttgattgctgggcgaattcccggcagaactgcagaggaaatagagaaatattgtagcaggcgatatattagtgagtactaggtcacatgggtttctaatagtcaatgaagaagaagggtagaagcagccttgcctatctaactgatttaagtttgggatatatatatcgactttgagtgatggccatatcttctggggtttataaggaagtatgt

SEQ ID NO: 535 - DNA, 372 bp, Pinus radiata
tttgtttgtgaggtggagagatcagaattctgcgaggtttttttgtcaatcaaaaaacagatggacagggatcatcatttgcagcatcatcgagtcgtaattcaagcttttcaaatggatatgataacccacagaacacgaataagaattcttcttcggggggaactggtgatgccggaagctttgaatgcaacatctgccttgaacttgctcaggacccaattgtgacactctgtggtcacctgttctgctggccttgcctgtacaaatggcttcacggtcattcgaagtctcaagagtgccctgtatgtaaggctttggtggaagaggacaaaattgttcccttgtatgggcgtgggaaggtgggttctc

SEQ ID NO: 536 - DNA, 836 bp, Pinus radiata
gtttgttcgaacgatgaaaaccagctaaaacaaagcgcagggattggcaggattcgagcagtggtccttggggcggagttgatagaagaagaagaaacctaccatatacacatacatatattatatacatagacacatgggggctccgaagcagaaatggacttccgaagaggagggagctctcaaagcaggtgttgagaagtatggcactggcaagtggcggaccattcagaaggaccctgagtttggacactgcctcgccgctcgttccaatgtggatttgaaggataagtggcgcaatatgagtgtgagtgctagtggccaaggttcaagggataaggtaaagactccaagagtaaaagctattgcctctctgccttattcatcagttactgctgaatctacttctgtattctcaatagaagcaacaacctcaacaactccagataatcttatttcccctaaaagttcatcaaatgggaaaattcactcaccaaggtacgatggtatgattttagaagcccttacaagtatgcaagatccaaatgggatagacattgccacaattgcaagtttcatggaggagcgacatgaattgccccccaatttcaagagggcgcttggcacaaagctaaggcggttggttgcacaggaaaaggttataaagattcgcaatagttacaagctcaaagatatgacatctacagaagtgacatctgaagtcttgggatctgcaattccaattgataattcaatgcaatactctaatgcattcaccaatacaattgataccttttcagtagatagagtaaatgaagcttcaatggctgctgcca

SEQ ID NO: 537 - DNA, 478 bp, Pinus radiata
atcacagtcggcctctgatcaaagaagaagccgaatcaggtgataattctgcaaattctgcagatgtagaaactcttcttcctcaggttgatgaaacagcttctgctgatctgacagtgttcccaggttttgttaccccttatgtaccatacgggttccccatatggcacacttttagacccacaataactcaaacttccaatgtttataagccaacagctgtaatgccaactgctccaataaaaatggacgaatgcacagggttatcccagttaagcctcggcggtgttgcagcggcttctgcaatgaaaccctcagaactgtcactcaaattacatggaagacccccctctagacaatcagcttttcaggccaaaccatctctcaatgaaagcagtagtttgagttccagcagcaatgtcatcagtgtagtctgaattgcaaggaaaagcaggtgtgaagaagatgatggtatgga

SEQ ID NO: 538 - DNA, 565 bp, Pinus radiata
cacatccatacatgtggggtggacagccgttgatgccaccttatgggactccactaccatatcctgcaatgtatccacatggaggaatctatgcacatccttccatgcctccgggtgcacttccgtatggtcactatggaatgccatcacctggcaatgctgaagttacaacgactttagcacttccaaatgctgaagcagaagccaagtcctcggaaggcaaagagcggaatacaatgaagagatcaaaaggaagtttaggaagccttggaatgattactggcaaaggaggagaaggtggcaaggcaacatcgggatctgcaaatgaggccatgtcacaaagtggggacagtggcagtgacggttcaagcgaaggaagcgaggaatataacactcaaactgagtcacaagtggcgagaaagagaagttttgatcaaatgatagtagatggagccaatgctcagagtaccaatattcaatcatataattcccaggctggagaaccctatgtgacttccggcgggcatgcaatgggtaatcccattagtcaagctgttgctgcagt

SEQ ID NO: 539 - DNA, 350 bp, Pinus radiata
gggaaagtcaccgccagtgggaaggtaacttctggagttaatgatttattttgggaacagtttctaacagagactccgggctcagcaacagatacacaagaagctgagtcaaaaattcaggagactagaactaaggatcaagatgaaaggttgcctgagaatgggaagtgttggagcaacaagcagacattggatcaacttacagaacagatggggcagctggcatcagggacgcaaacttgaaataagattatagaggctgctagtaggtgcatatcactgtcagttctgctaaaatttctggttagcaatggtcactgtttatgtgtcctaatgaattgctccaaata

SEQ ID NO: 540 - DNA, 479 bp, Pinus radiata
catatcattcatatgaatatggatagcaggcaatcaggggaagaggaagactgcaacgtcactcggccaggaggaggaggaggaatatcattacatgttagcagcgtggaatattgccagaagagtgcttgtgttgcccatgatatctcttctgatgaacaagatctgataaatagacttcacaatcttctgggcgacaggtgggcactgattgcggggcgccttccatggagaagaagagaggagattgagaattactgtaaaatgagatacacagccactacctcttcttcacgctcttgaatctccctttctctcgccaggttatggagtgtggaccaactatcgtaatcagatagtttgggttgattcagattgtttaggtttatctccacttgaaaatatgtgtggatatttgtttgtttgttttatcaaaaccaagtatagaagaaataaaatttgatcgttttatcgattta

SEQ ID NO: 541 - DNA, 580 bp, Pinus radiata
agagagagaacgtgggagaaaacctgcaaatggccgtgaagaacctctgaatcatgttgaggctgagcggcaaaggcgtgagaaattgaaccagaaattttatgagcttcgtgccgtggttcctaatgtatcgaaaatggacaaagcttctctgctcggcgatgctgctgcttatatcaaagatctcttttccaaacagcaggatttggagtccgagagggttgatatgcaggttcaaattgacactataaagaaggaattattgatgaattctttgaagttggcagctaaagaagcaaaagatctttcaagcattgaccttaaaggttttagccaggggaaattccccggcttgaattcagaagttcgcattgttggccgagaggcgataataagaattcagtgtactaaacataatcatcctgttgcgagactgatgatagcactgcaagaacttgatttggaagttctccatgcaagtatttctactgtgaaggattccttaattatccagacagtcattgttaaaatgaccagaggtttgtacacggaagaccaacttcacgccctgctttgtaag

SEQ ID NO: 542 - DNA, 445 bp, Pinus radiata
caaaagcaaggagcaagaaaagcaaatggatttgcatcaaataatattgtaattggggcagtaatattgaagtccaagggaccaggggcttattaagggcatcgagtaaagcctctgaattttcaaccttgtagaacctaattgagtaaaacttcattcagttggattctcatcgttttcatggcttacaaccgcaaacatgccgccgccgcaaccagcccggacagcagcctgggctcagacaacgagtccggcggcggaggaggaggcggcggaggaaaagggcagtcgacgaagaatggcaatggcaactacattagagagcaggatcgcctgctccccatagcgaacgtggggcggataatgaaacgggcgctgccggggaatgcgaaaatctccaaagacgcgaaggagacggtgcaggaatgtgtgtcggagttcatca

SEQ ID NO: 543 - DNA, 682 bp, Pinus radiata
aattttttcctgtcaaagcactcgagaattggggtttgtggaagattgctattgaaagatctctgtgtgcaactctgaggtctgggatggtgaaggaaaccttcgcgttgttgaaagacaataacaacaacaatcatgacgaaatattgccttcgtcggtgaagcttcaagggcggcagacttatagcttgtaaaagttttgcctttagggttttgccattagtgttgcaagcctgtaaattataatttgcaggttccatggccacgcggaatccctttgacctgcttgaggatgatgataatggcgacccgtcgtcattgctggacaccctcgctgctgcaaaggacaagccggcggcagtggctgccaagaaacagcagccagcagtgtcggcgagcggaaaactgccgacgaaaccccttcccccggcccaggctgttaaggaatcgagggtttctccaaatgaggggggcaggggacgaggtggcggtcgaggcggccgtggatttggcaacagagaatcgcaggagtttggacgtggccgtgggggaggttataatgttgaacggaacttcaaccgcgagaacaatgcctattcgggttctcgtgttgggttctatgacaacaattctgatttgatccccagccgcaatgaggatggagatggagcttcgaacgatc

SEQ ID NO: 544 - DNA, 372 bp, Pinus radiata
gtttcctcaacctagtgagtaacattcgtgaattcgttatgcaagtagcttgcggaagggcacttctatcatgttattcttattccgagctactgtcagctatatgatggacctgtgttttcatcactggctcacttcacctgtttgagtatctgccatttttggatgtttgtgtaagcttggctaaataccagagacacaaagaaaccgtcctgtagccggagttatcgaaactatttacaatgccacgggtgaaattaatttccaggaacttcatggacatggtggcagcattaccggctgcaaagttagatcggctttatgataagtcattgcatttgcgaagcgggctgaggtctctgactcctgtgc

SEQ ID NO: 545 - DNA, 444 bp, Pinus radiata
accgagtactgagtttcgaagattttcataatacagcgagaatgaatttcaggcacttgaaaagtatcggaaaaggacgcaagcatagccctatgttgtttgtccgagtcaaatgaagcactgggattcgaatctttgatcacaaaatggcaaattatacctttaagcatgcaggcccagctcattattttcactctacgaattccgtttactatttcatgaaccgggcatttatgggctacaagcgacttttattataaggcttctttcttctctttgactttcatatagctgacatgaatggcagaagagatggacacaccgacaaaaacaacaaagacgcctacatcacaggaacaaacttccacaagcactcccgtggcttatcctgagtgggctgcaccaatacaggctctatataattctggaaagacaccactccct

SEQ ID NO: 546 - DNA, 570 bp, Pinus radiata
tcgttctcaagcaccagggagagcatggaaaggcgagatcagagtccggttgcagctcgccaccccatgagaaaacactacagaggagttcggcagaggcaatggggcaaatgggtagccgagattcgcctccctcagaatcgaacccggctctggctcggcacctttgacaccgcagaagcagcagctctagcatatgaccgagctgcttacagatggcggggtgagtgcgctcggcttaatttcccccatttgttctcaaaaaagtatcagaattcctctcccagctccaccaatggcaggattcctcgcctttcttgtgaaaaatctgatcagaaatatgcatataatggtgacccagttcatacgaatgtatataagggtcccccaattcggataactgcatacaacggcgacccagttcctatagatgtatataggagtgacccagttcgggtaagtgcatatactggtgacccagttcggataagtgcttatagtggtgatccagttggcaataccgttactttagcggaatccgagcttgaaagctcctgcagccatgaatcc

SEQ ID NO: 547 - DNA, 532 bp, Pinus radiata
cttgattatatggaagaacaaaattgggatataaatggagcaaaatatgatggttcagaaaagtggaaagctcatagtagtgaacaaaaggatcttggtacaataccaacaaaggtggaaggaaggattggcaatagagagaatagtttagatgtcacacgtggtggggctctttgggacatttttcggagagaggacataccaaagttacaggattatttattaaagcactgtcaagacttcagacatagcagaaatgtatctgttgattcggttgtccaccccattcatgatcaaactttttacttgaatgaaggtcataaaaagaaattgaaggaggaataccaagtagaaccatggacatttgaacaacaccttggtgaggcagtttttattccagctggatgtcctcatcaagttagaaacttgaagtcctgtataaaagtggctttgaactttgtttcacctgaaaatttacaagaatgcattcgtttagaggatgagttgcgcttgcttccaaagaatcacaggg

SEQ ID NO: 548 - DNA, 447 bp, Pinus radiata
agggtccccgcgaaatgactgaagaggagcgggagacgaagaaggccgccagtgtggccgccacggctgccgaccaggagctcaggaagaaagtgctgcgggatctgcacgcgctgattaatcccaacgcgactggagaggcggatccggcggagtttccaggggatgatgctactgtagatggggaagtcacggacgccgagtggttttacttggtgtccatgatgaagtcatttggaaatggcttgggggtgccgggacaggcattttgcggtggcatgcctatttggatcattgggtcagaaaagcttcagagctacaactgtgagcgggctcgtcaggctcagcaattcggcattcaaaccatggtatgtattccaacacctaatggagttgttgagttgggttccacggatttaaatccgcagaactgggatttgatacaga

SEQ ID NO: 549 - DNA, 1163 bp, Pinus radiata
gtggtctaagagctgatagtttgtttttaagtggtggttttttctggatatttttcctgaatattagcggtttctattcctgcggaaggcagcagcagctggtttgaaagcagcagcagctgttttggaaacaaaacaatgtgtggaggtgccattatcaaggaattcattccggccaatcgatctcggcgtgtaactgctagggagctgtggccggatttcgacacgttcgctgaattcatcaatggcggagcaacgcaagaaacattcaataaacctggcaagttggacgagggatgcaagcagaagagtaagcccagcaagggttctgtcaagacccagcaggaattttgttccgggtttgaaggtgggagaagtgaggtgattcctcctttggaagatgtggaagggtccacacccacgattggggggaggaagagaaaaaatgtttacagaggtatcagacagcgtccatggggaaaatgggctgcggagattcgagatcccagtaagggggttagggtttggcttggaacgttcaacacggcagaggaggccgccaaggcctatgatgcagcggctaaaaggatccgaggtaagaaagctaagctaaattttgctgataactcgtgttctgttaaaaatgacactagcaagaaattgtcaggaaagaaaggaaagttgtgctcaaaacaccctgctttgttgttagagggtttcaatgcaagctgtaaggtaaaaccctcatattcagcaaatcctgatttattagggggttacaatataaacaggaaagtaaaagcctctttgagtggtgtcggcaaatctgatcttacaatctgtggatacgatgatatggaatatggtgactctgggttctcaaaacccagtgccccattccaaaacaattcaaatgcatgcacggtccaattttctgagcatagcaatttaacccaaacttcgcagaaatcgtgctcttgtgagatctgtagtcacaattactcagagatgagcaatgtaatgcctcctgcttatggcaatgctgtaaattttgaaccagtgcaaacttccaatccaggaggttattttgattctgaccatagcagcatgtcatttgaaggggcgcatttcccatgggctcaagaaataaagacgccagaagt

SEQ ID NO: 550 - DNA, 545 bp, Pinus radiata
cagctaaaactcttcatccctgctgggatgcataccagcttgaggacgaaagagcaagtgctgtttatataaatgtattttcgggggatgctacaactgaatttcccagtgcattgcaactgggcagaggagggattttggcagatgccatggggcttggtaagactgtcatgacaatatcactactgcttgcaaattctggcaaaggtggctttagtggtatggatactgtggagccctttagtgcgaacagctgtagtgaaaaaacaatcattcatccttataatataggtgtagagctgggaccatcacagtacaccaacaaaacacaaggcacaagtatgctaaggagatcaagcagtgggttacataaaggaggcgggaatcttatagtatgtcctatgacattattaagtcaatggaagacagaacttgagacccatgtacagtctggaaccatgtccgtgtatgttcattatggacaaagtagaacaaaggatgttaaaagtcttttgcagcatgatgttgtcttgaccacttatggg

SEQ ID NO: 551 - DNA, 353 bp, Pinus radiata
gcactacaagtctatacctcctccatctcatgttataaataccagttggcttctttctggtctctttgcattattgattggctggctgttttctctcttctggacctcgatcttcggtcttcatcgatatcataatctctacctctatctccatcggggcttcgttgcctctgtatgtttgtaggtatgatgtccgaagttggcagcccaacaagccaggacagccgcaactctgaggatggagaaagggagaactgtgctgtgagagagcaagataggttcatgcccattgctaatgtcattaggataatgaggaaagttctacccacccatgcaaagatttctgatgatgc

SEQ ID NO: 552 - DNA, 448 bp, Pinus radiata
caaacaatccgtgttttgggagcggagagcaacggggaggggtctttcatgggttttgagcagacgagaggaggaggaggaggtgcgaagatgacgcagcatcaggtggtaactacggagttggtacggcaggcaactgagcgcttacgaaagctttgcaggacgggagtcaaagtcgaactcagagatttttttcaactctgcatcgtgctcgccaagtcaattgattctgcggttgtatataaccaaattccgactatggtgcatgagttgccacaattagtgagacaggtttttgaacgcaaagatgatattcgacttcaaccagcaatcatggttcttatgctctctgtgaagaatgcttgtcgaagtggttggtttcgtgtcacggacacagatgaactgctaaccatgtcaaaggagctgtcaagtcgctttacgagtacgg

SEQ ID NO: 553 - DNA, 883 bp, Pinus radiata
tttttattcaaatgacagcacgacttcccttcctcagatgtttcccaggctgcactcatcagctgcagcaccacgcggttttggattctccctgttctttgttctgttgcgttaaagattggttgcaggtcgaatcgcccaggccgatttgaattctcctgaggattgacaagatgacgcgcaagtgctcgcactgtggcaacaacgggcataactccaggacgtgccctaaccgcggcggggtgaagctcttcggcgttcggcttaccgatggcccgatcagaaagagcgctagtatggggaatttgatgatgatgtccaaccctagctctcccgctgacccctccgagccggcctctgccgctgctgctgccgcggcggcggcggccagtggctatctctctgatggtcttgttgaagcctccacttcctccaattctcgcgagcggaagaaaggtgtgccatggacagaggaggaacatagaatgtttttgctaggtttgcagaagcttggcaaaggtgattggagaggaatagcacggaattttgtcataacacgaacacctacacaggtagccagccatgcacagaaatattttattcgacagagcaatatgactagaaagaagagacgttccagtctgtttgacatgacgccggtgagttttttcttcctgtcttaaattcttggtgtggtgggcatggaagggattcaggaggcgtcttgggcaaagatcccaaaaattggatttgcaatcaatcatgattcataattgttctgaaaattatgctaagaactaatctcatctttcaaacctcaaatggtattcttttgtttgaagttgtttctaagtttctttaatgtctattcataatttcattt

SEQ ID NO: 554 - DNA, 310 bp, Pinus radiata
gtgagttctaggcatgagtttgcagtatcgcaaatggcctacttacaagctttgaggaatgctggcgcaacccttagacaatttgcagaattagaatcaatggagcttcagaagacttcaccttacccacatcttcgccattatcgggtcaccttgcccccttcacctcctcctcttcccccacctccaccacctcctcctccattgtctctcaccccttctcctagttatggatctgcaacttttccttccagcatcccagtcaatcgaagcatctacagatgtccgtatcagcaatgctcaccatcat

SEQ ID NO: 555 - DNA, 463 bp, Pinus radiata
gtcaacttccagatgaagctattgctcttgcagcagcatcccatattgagagggagctgcagataacatcatggaatctgagctgcaattttgttgcctctactttgcagggtcgtgaatgtattgagcgcctggagattacagggattggagatccatcaggacggggacttggttttagttatcttcgagttgctccaaagccaccaatatcgagtgctttggttaaaaaaaaggcagctgctgcacgtggtggttccgcagttactggtactgatgctgatctccgaaggttgagtatggatgcagcaagggaggtgttgctgaagtttaatgttgacgaggaacaaattgaaaagatgactaggtggcatcggattgcaatggtgagaaagctttcaagtgagcaagctgcttcaggcgttaaagtagatgcaacagcattgaataagtttgcacgggg

SEQ ID NO: 556 - DNA, 496 bp, Pinus radiata
agatgagtggagtgagttcggctcggagctgtgtcgaggttttgttgggcagaggctgctctgtggagcggatcgctcgccgtttgagtcgggtcgcaaacgggcaatttgcgatgtggaatgtgcagaactgtggaagtagggttaatggaagacaattgtgcttctgatgatcgggagcatatagctttaatcgattatacgtttgctctttgttagttcattgggttatagttgtttcagtggagtagcgtgcagcagtttgatcggcgaaaatgaagagtccttcaaccagctgcctttctcatccagtggagggggagcagaagagcataaattctgaactctggcatgcttgcgctggaccccttgtttccttgccctcagtgggtagtgttgtgtattattttccacaaggccacagtgaacaggttgcagcttctactcagaaggtagctgacacgcacattccaaattatcctaatcttccttatca

SEQ ID NO: 557 - DNA, 642 bp, Pinus radiata
cctcaaggtacaatgggatgaaatatcagcaattgcacgaccagagagagtttccccgtggaaattagaaccttcattaactccagtggcagtgaatcctctgccagtagccaggggcaagaggcctcggccaaatatattaccttcatcttccgatttatcagtgcatgacaaggccccagtggattctactcaggtgcacaggtttccaagggtcttgcaaggtcaagaagttatgaccttggggggatctttgggtgacggtgagttggagagtggtcaaaagatggttgcatggggcggatcaaaactggatgatgtcaaagcagaaggtatgggttgtcaaagaaggttggtttcagaaaattggatgccgccacttaggcatgactcactatattcagatactttctcaagttttcaacctgtgggggaagtgcaagaattccgtggttcattaacaaatagtatcctggaagatggccagcagccaaagctttcaagaaaacagtttcaggaccaagagggtaaaattgtggatggatcaggactgtggtcaatgagttttccaaacagcttacaattgtgcgagtcaaataggaagatgtctgcgacctctgctgcccaatcgcacaagcagag

SEQ ID NO: 558 - DNA, 653 bp, Pinus radiata
ggaattgacaagtgatagtcacaggcaagcaacacttcagttggaagctgaagttacagcgtggcacatcagtttctgtagcttgataaaaagtcaacaggattatatttgtgccctgtatgagtgggcacgtctaagtcttgttcagcttgggaatgaagcacagtgggaacgaggaaaccgcccacctatttatactctttgtgatgtatggcaacaagtacttaaaagattgccagacaaggttgcttctgagtccatcaaaagcttcatctctgttgttcatgctatagtgatgcagcaagctgatgaacaaaagcgcaagaagaaagcagaaaacatttctagagagctgcaaaagaaaatgattgctttgcgcaatattgaaaagaagtattatagttcgtattcaatacctgctagggcagatgctacaacagagtctcaatttgaattgggtcacacagatcctttggcagaaaaaagagcagagattgaaatatataaaaggcggttagaagacgaaaaggccaactattcaaaatccgccagaggaaccagagaaatgaccttaaataatattcaaacaggccttccaggtctattccaagcactgagtagtttttcaagtgtgtgtgcaagttcctttgagg

SEQ ID NO: 559 - DNA, 100 bp, Pinus radiata
atggctatgggggaggcggagcggatcacggggccatggagtcccgaggaggacacatcgctgcacaagctggtggagaaatctgggccacggaactggt

SEQ ID NO: 560 - DNA, 385 bp, Pinus radiata
gttggcgccctgcaaaattcgccagaaatttattgccgaattacttcaagcccaacaatttctcaagttttggtcgccaactaaatacatatgggtttcggaagattgtaccagacagatgggagttctcaaatgagttttttcgcaagggagaaaagcagctactttctgaaatacacagaagaaaaggtctaatacaacctcctccaccacctgagaacagatccatttcaccgtctaactctggtgatgagcaaacgtggtcttccacctcctctcctaactcttccacgggggtggatgcccttagccataagaatgcaattgaagaaaatgagaaactgagaaaggaaaatctgttattggtatctgagctgacacaaat

SEQ ID NO: 561 - DNA, 328 bp, Pinus radiata
cccacatggactgcagcaccattcctccgatgatgctaatggcgatggcgataagagaattggggtggagacaggcagctctgtatgtccagagctctggcatgcctgtgctggccctctcatatctctgcctcctaagggcagtcgtgttgtgtactttccccagggtcacctggagcagattgcagacaatgagcttcacaggggtggccgtggctccttcctcaacatcaaccatgcggctgcaccgatggcagaggaagcatcttctgcagcagccttgaatataccgccatcgttcataagtcagccgtgaaccaacagatgc

SEQ ID NO: 562 - DNA, 440 bp, Pinus radiata
aggaaacgctcacgctcttaaagattagatcagaaatggattctaagttccgcgaagccacccacaaaggtcccttatgggacgaagtctcaagggctcttgcggagcacggttaccagagaagttccaagaagtgccgggagaaattcgagaatctttacaaatactacaagaaaacaaaagaaggcaaagcaggaaggcaagacggaaagcattaccgtttctttagccagctcgaagctttgtacggaggaacaactattgatgctgccgacagttgttttggcgtaacaacacggacaaatttaaccgaaagtccaggcctggactttaacggagacggagcctcgcagaaatacgctgacactcaccacaacagcgagggctttagtttgtcttcggattcttcttcggatgacgagtacagtcacgatatacag

SEQ ID NO: 563 - DNA, 359 bp, Pinus radiata
ggaaagtcgaacatagaaatcttctgtgcattcatagaataaatattctacaggctgcactgtaatttaggcgagaaatcgaataaaatatacatttgtttgtttacgatggagttggcagatgagcattccatcctccgctataagaaacccaagctctccaagaatgtcgtttccgagcgccgccgaaggcagaaaatgaacaagcttctctacactctgagggctctggttcccaatatttccaagatggacaaggcatcgattttagcggacgccatcgaatatgtggagaagctgaagcaacaggtggagagagctgagtctgacgttcaatccaccaacgtctcggctctatc

SEQ ID NO: 564 - DNA, 249 bp, Pinus radiata
agggaattcaacatcaatgctgatgtctatgcacaggattccattgagttgttgaagcagagtgggattgatttcgagaagaatgaggagaagggtatcgattcgcatcgtttcggcgagcttctcatgtcatcgggcgttgtgttgaacgaaaatgtgaattggattaccttccacagtggatatgactttgggtacctgttgaaattgctgacatgccagaacctgccccccgaggaatcggatttc

SEQ ID NO: 565 - DNA, 542 bp, Pinus radiata
agaaggttggaatggcttagtccgctcatttgatggcgaacagatctttgtggggaggttcagactttgattatgagaacgaagccgatacgaggaagggtccatggactgtggaagaggacatgcagcttggtattgtaaatttgcacggagaaggacgctggaactttctcgccagagcatctggcctccagagaactggtaagagctgccggctaaggtgggttaactatctccggcctgatctcaagcggagcaagatcactcctgaagaagaacgtttgattattgaactccatcgccgttggggaaataggtggtctcgtattgcacaaagtttaccgggaaggacggacaatgaaatcaagaatttctggagaactcgtatgaagggaaaactaaactcagaaactcagaaggacatcgccggcgtggatgcagacgacggagtacagtttgaaagcgaattgggatcttgccgcctcccagttatttcatcccatgcactgcctgaagtagacgttgcagagccttcgagtact

SEQ ID NO: 566 - DNA, 358 bp, Pinus radiata
gggacagtagggaggaagagaagacgaattcatcgatccagtattggtgtaactggtggcagaggactacggcatttcagcatgaaagtttgtaagaaagtggagagcaagggctggacaacatacaacgaggttgcatctgaattagtggccgaatttgtgaatccaaacagcacacatctttcacaagatcagcaacagtttgatgagaagaacattaggaggagggtgtatgatgcactgaacgtactgatggccatggacataatatcaaaggagaaaaaggagattagatggaaagggctacctacaacaaatctaagtgacattgaacggctaaagactgagcgaaagaggt

SEQ ID NO: 567 - DNA, 722 bp, Pinus radiata
atgcccccgagcatttgccagggcttacaacttgaagacgcacatggccactcatgaccccaaccgtcttaaacctcatgtgtgccctcaccgctcgtgtgcgcggtcatttagccgcaagcatgacctcgggcgtcacttggtcagcattcatcgtgacgattccgtggtttctacgccctctgcgtcaatgaagtctattggtgtcgacagtggccgcaggagttggtgtgacaactgcggcaaaggaacaatcggcgcatcgtgccagtgttcatgcgccgatatcaagtagttgcggatcgcgttgctctgtttaaacactatgcgtatatgccatgggcgagtatatttcgccactcgcttcgtcgcagtcgatggttgattcgtccactgcgttcttctgacgtatcattcctctatctgcgctatttccgacgtgttgcgtatcgtaccgttcagccatagatgctgaacccagtgacgaacgcgatcgcgagttgcctcatttattcgtgacccaccacgggctggacactatttgtctaactatctcgctgggatactttatctgttgttaactccttattcaacgattcttatgagcccttcgtaacttagcagatcccattttccttaacttttcattatattttggaaggcgcatcggcgtgattccaccaatactggaaataccattatttatgcatccaaaaaaaaaa

SEQ ID NO: 568 - DNA, 489 bp, Pinus radiata
ccacgctccaattttctgtagagtcgcgaggaatttccaactgagggttattctgaaggaaaacaggcgccgggagacatttgatgggttcttgagagaggaccacgagaaagtatcccaactggtcactcagcactacaaggtccagctcgagaccaaggaaatcagcgtcaagggatggaactggggatctactgatgttcaaggcaacgatctcgcatttgtcgttgcaaacaggaccgcctttgaagttcctctccgatcaatcaccaactcgaacatcgctggaaggacagaagtctctctggagtttagcacggcgcccgccccatcagctagcaaatccaaaaagggccgcccagacgaattgacagaaattcgattctatgtccctggcacgcataccaaggacgatgacgacgaggctgatatcaccaaagatgacgaggaggtttctgcggctcaggcgttccatgacatgatcaagga

SEQ ID NO: 569 - DNA, 490 bp, Pinus radiata
ggttctggtggcgtgaaaatggaggatcattctcctgtcatcatcaactctcagtcaggttattgccagtcccagcagtcatcacagatgcctttagctggctacatgtcacctcatggtattcccattcagcacactgacgatgccgcctcgaaagagactcagtaccttcgccggaggtgcttcaattgccacaccactgagccaccgagttggaggagatcgacactcacccccgggaagattgtttgcaacaagtgtggtctttatgagcgcactcatttgcgacctcgtcctcttcgttttgatgaactgagagcaggcaacaagtcgcgaaagcaaacaaagtcaagtcccaagggcgcaaaggtcatccccccggggccccttcctatcaagaaggagcctgctgagatggaggcgatctcgcggaggatgtctgtttcatccagctcttccgcccaatccggtggtggtgggtcgagtgact

SEQ ID NO: 570 - DNA, 447 bp, Pinus radiata
aagaaacctacttggggcaagagctcagcccatgaaactttctgctaaaaatgattcaaaactgggtattgcaaggcctgccaagctctacagaggagtgagacagaggcactgggggaaatgggtagcagagatcagattacctaggaatagaaccaggctctggcttggaacttttgacacagcagaagaagcagcgtttgcatatgacacagcagcctaccaactacgtggtgagtacgcaaggcttaattttccggacttgaggtatcttttgctctcaaattcggataacggtagccataatgttctttcgccaccgggtaatgcgttatctgtgctgaaatcttctgttgatgcaaagctccaggcaatttgccagcgtttatcccaggaaaattcttcagaaaatcgtctgatggcacacagtgccaacaatgaagctct

SEQ ID NO: 571 - DNA, 146 bp, Pinus radiata
cgtttctggaagccctagaaaagagagaagaggatagaatgatgagggaagaggcctggaaaaggcaggaaatggcgagattgaacaaggatcaagaattaaggtctcaggaacgttctatggctgcttcaagggatttggcatta

SEQ ID NO: 572 - DNA, 767 bp, Pinus radiata
gtcgccctgtcaaataatcccttgatcttcagcgctaaggttgaaaatggtactcctagctatgatggtctgaagcatgctaatacgaatcctatgccattttctgggttgggtaatgtttccatgggccctttgttttatcaagcaaatccaatccagcgagtcaagagagttagggacactagtttcatcatgggacccccttccagccctttcggtcgcatgggtgtgaatggtcacatggggatgaatgatgtcagtaagagcttgcagcctggttttaaggccagagttccttaccccctccaagctgctagatcggattcattcgttgctcaaggctgctttccctatgaccctaatctcagcagcactagtaatttgcccctgggagggttttcatcaggcagccatgccgttatgaatggtactttctcttcttctaggcttttttctggccagaagctggagctcccttcaagccaatttgctgagtctgtgcagactgcaggctcaagcatcaatccagttttaaataggagcactcctcttttgctgccgcccgttcctactcagacgatcaatcaagtagactacagcttctctacgccaaaaaatagtgggttgttagaatctatgttccaagaagctcaaacaatgggtggggttaaggctcattcctcctcaaattcctcgattgacctgcaggggggctccaaaagcagtatcagtaacccactgaacaatgggttcctatgcagatcaag

SEQ ID NO: 573 - DNA, 445 bp, Pinus radiata
gaatcaggatggaggagcctctgcaaattataaattcatctccgatacagcagcagcatgatcatgatgatgatgatcatgggcatgggcatgaggaggaggtaattccccaccctctgcttccccctcctggcgacacttgtattgttccatacatcatgcccgtttccacctctaccgcagaaaaacaccctccccagccaaccaatatcgcctttaacggcccggaaacagaggaagacgacaagaaacgggatagagagcacaagaagcggtccaagaactggaccagggtcgaaaccctcaagcttataaagcttcgaacagaatttgagcccaggttttctcgcagcggaagaaagacggaactctgggacgaaatagctgagtctctgcgaaaagaacagtttttcagggacgcccagcagtgcagagacaaatggga

SEQ ID NO: 574 - DNA, 731 bp, Pinus radiata
cccaggtgtcaggaatatacaggaccctcggaaaaatggtgaattgggctgaacaaagagatcagaattgaggtgagaagagcaggcaatctctgatcagaagaattgggtacttggaatcgatggatcagcagcagcccacaataccagcactacctcaagtgggttatggcacaaatccatatatagcccctccgattgggggtcctccacacccacaattagcatcataccatcaacagcttcaggccttctggggtaaccagatgagggaggttgagcaggcgcaggacttcaagacccacagcctgcctctggccagaattaagaagatcatgaaggcagacgaggatgtgaagatgatctctgcagaggcaccggtggtgtttgccaaggcatgcgagatgttcatactggaactgaccttgaggtcatggattcatacagaggagaacaagagaagaactttgcagaagaatgacatagctgcagccattggtaggaccgatatatttgatttccttgttgatattgtgcctagagatgaattcaaggatgaggggttggtgatccctagggctgcgggtgccgtgcccttcatgggtcctggggataacgtgccatcttattactatgttgcacagcaagctcccaacgtggcggcttatgctcctcctactcagcaaatgaggtccaaagcacccgcacctcctcctcatggcagcagttga

SEQ ID NO: 575 - DNA, 441 bp, Pinus radiata
cagggatcattgactctgcccaggactctaagtaggaggactgtcgacgatgtgtggagagagattcataaggaaaacattgatgggaatgggaatgcgccggcgaatcaggccaggcagccaactttcggagagatgacattggaagatttcttggtgaaagcaggggttgtgagagaggatgcagagcagggagatgggcagtcatttggggcgtttcggaatgctctagatggggaatttgtagcaaatttggcagaaagaaatggggataatagattaggtatcggtaattcacttggccttggatttggtgaaagagggcataggaatggagaagtgggtagtaacaagagtggagcagggggcgtgcctggactttctctgtctcctactaatgtcttcctaatcatgctgccatggatatggtgaatcttgatg

SEQ ID NO: 576 - DNA, 271 bp, Pinus radiata
tttcaaaggagaaaaaagaaatccattggaaggggttgcctaaagacaagtataaatgatgttgaacagcttaaggctgagaaattgctcttgaaaagtaggattgagaagaaagcatcttattttcacgaactcgaagaacagattataggccttcaaaatctggtgaaacgaaacgagcatagatatagttcagggaatactccatctgggggtgtatcgttacccttcatattggtccagactcatccccgtgccactgttgaaattg

SEQ ID NO: 577 - DNA, 315 bp, Pinus radiata
gggattcgcagagctaccagacagaaaagtggtattctatcttcagttctttctaaccagaatgcccatctcagtgtgcttgctgctgcagctagtgctgttgccacaaagagcatgtttcatgttttctacaatccaaggacaagtccagcagagttcattataccttatcagaaatatgtgaaaagttgcaagcaaccattgtctattggaatgcgcttcaaaatgagatttgaaacagaggataccgctgagagaaggtacactggcatgataactgcaataggtgatgcagatcctgctagatggcctggt

SEQ ID NO: 578 - DNA, 384 bp, Pinus radiata
caagatacccactctgaaccaatggctatggagatgggattagtcattgacggagataggttttcctcagagggtgatggagatattatgttggatggcgaggatctgttgccagaaatcaacgatatgttttgggaacaatttcttgcagagagtgcaacgtcagggggaacggaagaggctgagtctgcagcgcaggaaagtcttaccaaagatcaggatgagaaaccatctgaaaatgggaattggtggaaaaaaaatcaaaatatggataatctcacggaacagatgggtcagctggcatcagaatcaaatccttgagatttgtatcttgggatagatgcatattgtggagggaaggatttcctttcccaatttggctag

SEQ ID NO: 579 - DNA, 434 bp, Pinus radiata
gcgatggagctgttagggatgcagggaggctagtgcctgccccttttctggtgaagatgtatcgtttagtggatgatccctccacaaaccacatcgtttcttggggagagaataacaacagcttcgtggtatggcgccccaaagagttctctgcgtctgtgctgccatgctatttcaaccacgccaatttctccagctttgttcgacagctcaataattatggatttcgaaagacatttcgcgggcagtgcgagttttcgaacaaattattcgagaagggcaagcagtatctcctttgtcatatccatagaagaagagcgtccaatagctcgcccatgccgatggaatatggtaaatcatctttattattcccaatcattctacctacacaacactccaatgttctggcagcgcctctgccttcttctctgtca

SEQ ID NO: 580 - DNA, 322 bp, Pinus radiata
aaggaacggatcttaaccgaagagaacctttttcttcgtaaaaagtgtggtgatgaacatgtggattgttcggcttttagaacacctccagcacaacttagaagcatccagaacattgatgtggagactcaactggttataagacctccaactgtacaacagcaccctgacgtcgatagtcctcgataactgttgcatatgcaaattttctactttcatgaaataaacaaacagtacacctcattttgttcgccttttgtaaacgtataattactactgcatatgtaagctttcctctcaaaaaaaaaaaaaaaaaaaaaaa

SEQ ID NO: 581 - DNA, 448 bp, Pinus radiata
aggatccaaatgcgccaaagaaagccatgactggatttatgttcttttctcaagttgaaagagagaatctgaaaaagagtgacccaggaatggcatttactgatgtgggaagaacacttggagaacggtggaaaaaaatgtcagctgaggagaaagctccttacgaatcaaaagccagggctgataaggaaaggtacaaggaagcaatggccgattacaaaagtggtccaacaaatgtggactccgggaatgaatctgatagtgaatagagcatcatacttacaagttcatattaacatggctagccgtgtaaagtaattgctttcatttaaatgctttcaccctctggtgcaatctttttacattcacttgagaatattgttggtgtacttcacattagcaaaaagcaagcttacaactgagtagtgtcgagggatatacctacatg

SEQ ID NO: 582 - DNA, 321 bp, Pinus radiata
accttctttttggagtcaacatagattcctcgtctttgattgttcctaatacagtatcaaacatgaggagtattggcagcagtactgatgcagtcatgcaatttggtgtttctaattatttgaatgcacctccttgtgcttccggttccaatatttcattgaattcagacatcagtgcttctgcatgtttagatgaaagtggacttttaccacccgctgaaaatttgggacagatgaatgcacctacaagaaccttcataaaggtttataagcaagggtcagtcgggagatcgctagatatctcacgcttcagcagttatc

SEQ ID NO: 583 - DNA, 739 bp, Pinus radiata
ctgaattctatccggttgggtattaaattaaggtgattgttcgctacagacgttctgtggacaccgagtgagtctcctagccttggaatttggcaccatctcgtcccgcagccatttcagttcgatctcccgccgtcacaaaaaataatccccaattctccagctgtccctgccgtgtctgcacgcgacaggtctgcccgggctttggtctgtggaatttcatgccaatttatcacctataaactccacccgcatctgcccacaaaccccacaagtcacacccctcttcgtcttctttgaaatctcagatgggttctgccaattagctcggatccttgcctcttcagttggttttgtgagcacacacgaggccaggacccgggtatcaacgattcccctcaactgacgtaacccatggcgaccactcggcatcagcgcagtcccgatagcagcccgcgctcggaggatgaatcaggagcgcacacgtacagcaaccaggatggttccgtgaaggaacaggatcgatttctgcccattgctaatgtgagcagaatcatgaagaaagcccttccagctaatgccaagatatcgaaagatgccaaggagacggtgcaggaatgcgtttcagagttcatcagtttcatcactggggaagcctctgacaagtgtcagagggagaagaagaagaccatcaatggggacgacctgctgtgggcaatgggaactctagggtttgaaa

SEQ ID NO: 584 - DNA, 413 bp, Pinus radiata
aaatctgactatcgggatagtgatgatgaaggaggaggtactgttcgagaaggaaaggatctgcaaacctcaaatttcatcgattattttggtcaaagtaatcatacagaagaagcagaaaatgagcatgatgcatcagtggataccaaagggcccctggaatccagcaatgaagtcggccatcctaccacataccccgaatcttcttcattgtcagcgcaaggctctgagcctcgagttttttcctgtaattactgccagagaaaattctacagctcgcaggccttaggaggccatcagaatgctcacaagcgagaacgcaccttggcaaagagggggcaaagaattggggcttttcaacacaggtacataagcatggcatccctgcctctccatggctctacagaatcagc

SEQ ID NO: 585 - DNA, 622 bp, Pinus radiata
ggtctaggggaaaagctttgaaattatttgggtttgagtttagagggtcagaaggtggatcatttgaagggactaatggttctgatcagccacaagatgggactaatatattaactgcaggtgaagcatccactgagccagtggaggaagaactagtgattgaggccaaaaatggagattcagggaaattagaagatgtgggtagtccagtagaggctggagaaagtggtagcactagcaattgcctgggatcatctgctcaagaaaatcggaaatatgaatgccaatactgttgcagagagtttgcaaattcgcaggctctcgggggccatcaaaatgcgcacaaaaaagagagacagcaggccaaacgcgcgcacctgctggccaccaggagcgctgctgcgagtgccaacagaagtggcgccactgcatggtgcgggaacataaacggtaacctctaccatagaaatttccttttcaataattcctacttcacacgcatgcaggtgtttcaagaagatttcccgacctttcagaccccacaggctgttgcagctccatcaatcccgcattatatcttcagttaccagcagcagcagcaggcgcccgtgcagagtcgctg

SEQ ID NO: 586 - DNA, 349 bp, Pinus radiata
tgtaccggaaaattccaaacaaataatcaaccatggactcatattgccggagatgggctcagtggacagcgggcgcgaaggcacgagagcaattttgtccgatgattgtgtgaaattcgaatgccgatattgttgtagggttttcccgacgtctcaggctctcggcggccaccagaacgcccataaacgagaacggcgccgggcaatgacgaggtttcagagatcgccctctgacagttcaaactattcaggaaaacagaatagtattgatctgtttagccgtgagagagttcccgggtcttctctcctttcaccacacggtacgagggatcatgttgtttgcagtgac

SEQ ID NO: 587 - DNA, 368 bp, Pinus radiata
aaaaaggcgtcagaatggggtgagtctgtagtaagtacaagcgaaaacagtaatgacttggatcctcctacttattctgaaacctcttcccctgctcaaggatctgatcctcgggttttcccctgtaatttctgtcaaagcaaattctacagttctcaagcattaggaggtcatcaaaatgcccataagcgtgagagaactttggctagaagggcacagagaatggggtcttttgcacaaagatattcaagcatggcatcacttccactccacggttcctcggaaacaagttggacgcccagtcggtttttagggataaaagcacattctttgattcacaaacctttccctgaaggtgataacctgcc

SEQ ID NO: 588 - DNA, 516 bp, Pinus radiata; identical to SEQ ID NO: 483

SEQ ID NO: 589 - DNA, 340 bp, Pinus radiata
gagaactagtctcgagttagttatttgattcatattggttgcagaggattttcagagattgatgatgagtgctgaagctgctatggagagggagagttgtttcatggatgaaatgcgcaggccgcagaggaagaagaagaccgacgcagaggatgattttgacgagtgttattatactcatatgtgcaagatttgcaagaagaagttcgtctcagggcgggcttttggcggtcatatgagaattcatggccctgtggccactgccgccgccgccgctgctgagagcaatgggaaaaatctggagccgcagaggaagagatcccgtgctgaagagattcga

SEQ ID NO: 590 - DNA, 391 bp, Pinus radiata
gttgggtgtaaagggtctgacgcgtttgaggagagcttgaagcatttttgtagagtttgcaagaggagatttgcttgtgggagggctctgggtggtcatatgagagtacatggagctgaattgggtgcaattaagggtggtggtttggaagagcagtttgagaaggggagggtgaaggagcccagtaggagttgtggtgattctgtcaaggaaggagtgcaggatgaggtagagggcttgaattctatgtacactttgaggaggaacccgaagcgaagctggaggtttgcagatcaggattactcttttgcctttgggggagtagatgggtctggggctaagagatttgggtctacatttttgagggattcaagagtctgtgaggagtgtg

SEQ ID NO: 591 - DNA, 260 bp, Pinus radiata; identical to SEQ ID NO: 349

SEQ ID NO: 592 - protein, 94 aa, Eucalyptus grandis
MGERDDLGLSLSLSFPQGHLHQQQQQQQQQSLQLNLMPSLVPSSASSAQSGFNLQKRSCNDAFPSSSDRNSEARSFLRGIDVNREPSAGAAADY

SEQ ID NO: 593 - protein, 44 aa, Eucalyptus grandis
DKARLVQETGLQLKQINNWFINQRKRNWHSNPSTSTVLKSKRKR

SEQ ID NO: 594 - protein, 291 aa, Eucalyptus grandis
GEPLWIRSVETGREILNYDEYVKEFKVEAPSEGRPKRSIEASRETGVVFVDLPRLVQSFMDVNQWKEMFPCMISKAATVDVVCSGEGPNRNGAVQLMFAELQMLTPMVPTREVYFIRYCKQLSAEQWALVDVSIEKVEDNIDASLVKCRKRPSGCIIEDKSNGHCKVIWVEHLECQKTTVHPMYRTIVNSGLAFGARHWMTTLQVQCERLVFFMATNVPTKDSNGVATLAGRKSILRLAQRLTQSFCQAIGASSYHSWTKVPTKTGEDIRVASRKNLNDPGEPLGVILCAV

SEQ ID NO: 595 - protein, 25 aa, Eucalyptus grandis
MQAVMTGCDSSNIAALPSGFSILPD

SEQ ID NO: 596 - protein, 263 aa, Eucalyptus grandis
QNGPSMPPVQPFVRAEMLPSGYLVRPCEGGGSIIRIVDHLDLEPWSVPEVLRPLYESSTMLAQKTTMAALRQLRQIAQEVSQPNVSGWGRRPAALRALSQRLSRGFNEALNGFTDEGWSIMGNDGIDDVTILVNSSPDKLMGLNLSFSNGFPAVSNAVLCARASMLLQNVPPAVLLRFLREHRSEWADNSIDAYSAAAVKVGSCALPGSRIGSFGGQVILPLAHTIEHEEFLEVIKLEGMGHSPEDALMPRDIFFLQMCSGVD

SEQ ID NO: 597 - protein, 134 aa, Eucalyptus grandis
CPIDSGRSFDTSLSLGLGCYGDPEDHEIKIKKPLAKLSGNSTCLTIGLPGGEACGLGSASGDEVRNIPSRSASSFSNSSSAKREKAEQGEEEAVERGTGSPRATINIEDEDEFSPRKKLRLSKAQSSILEEMLQ

SEQ ID NO: 598 - protein, 220 aa, Eucalyptus grandis
MGQQSLIYSFVARGTVILADYTEFTGNFTSVAFQCLQKLPATNNKFTYSCDGHTFNFLVDDGFTYCVVAVESVGRQVPIAFLERVKDDFTKRYGGGKAATAVAKSLNKEFGSKLKEQMQYCVDHPEEISKLAKVKAQVSEVKGVMMENIEKVLDRGEKIELLVDKTENLRSQAQDFRQQGTQIRRKMWLQNMKIKLIVLGILIALILIIVLSICGNGKCK

SEQ ID NO: 599 - protein, 149 aa, Eucalyptus grandis
EEKKEEPPAPITVVLKVGMHCEACTRVLRKRIRKIKGVETVETDVVNDRVIVKGVVDPPKLVAYVKKRTGKQASIVKEEEKKEEEKKEEAKKEESKEGEKKDGEEGKDEDGSKMDIKKNEYWPSRPYMEYQMYPTQIFSDENPNACSVM

SEQ ID NO: 600 - protein, 107 aa, Eucalyptus grandis
MEFPSEFSEASSQKRIGGRGKIEIKRIENTTNRQVTFCKRRNGLLKKAYELSVLCDAEVALIVFSSRGRLYEYANNSVRGTIERYKKASSDSSHPQSVSEVNTQFYP

SEQ ID NO: 601 - protein, 233 aa, Eucalyptus grandis
MARGKIQIKLIENTTNRQVTYSKRRNGLFKKANELTVLGDPKVSIIMISSTGKLHEYISPSTSTKKMYDQYQQALEVDLWSSHYEKMQENLRKLKEVNKKLQLEVRRRFGEGLNGMSLSELCGLEQDMDNAVSLIRERKYKTLGNQIDTARKKKKNAEEINKSLLQDWTNLIKHLREDDPHFGMVDNGRDYEAVIGYTDAAAAARLYTLRLQPDQPNLTSGGGSEITTYPLLE

SEQ ID NO: 602 - protein, 113 aa, Eucalyptus grandis
MSQKGLIYSFVAKGTVVLAEHTQFSGNFSTIAVQCLQKLPSNSSKYTYSCDGHTFNFLTDSGFVFLVVADESVGRSVPFVFLERVKDDFMQHYSASIASGDPHPLADDDEDDD

SEQ ID NO: 603 - protein, 111 aa, Eucalyptus grandis
MGRGRVELKRIENKINRQVTFSKRRNGLLKKAYELSVLCDVEVALLIFSSRGKLYEFGSAGPSGINKTLERYQRDNFTPQDNVAEHETQQNWFQEISKLKAKYELFNKLQK

SEQ ID NO: 604 - protein, 65 aa, Eucalyptus grandis
LLQKSSQEEDKARLVQDTGLQLTQINNWFINQRKRNWHSNPSSSTVPKSKRKRSHAGDPDKERPM

SEQ ID NO: 605 - protein, 60 aa, Eucalyptus grandis
CIETKARFGKSVESPATDKWKVWFQNRRARTKLKQTAVECEMLQKCCETLKEAHSRLQKE

SEQ ID NO: 606 - protein, 188 aa, Eucalyptus grandis
MAFAGTTQKCMACEKTVYLVDKLTADNRIYHKACFRCHHCKGTLKLGNYNSFEGVLYCRPHFDQLFKRTGSLEKSFEGTPKIAKPEKPVDGERPAATKASSMFGGTRDKCVGCKSTVYPTEKVTVNGTPYHKSCFKCTHGGCVISPSNYVAHEGKLYCRHHHTQLIKEKGNLSQLEGDHERETMAPES

SEQ ID NO: 607 - protein, 66 aa, Eucalyptus grandis
FGKIFEESVRKELSPEFAKLMQEGSAYLPSGICMSTMGRHVSYEQAIAWKVLSAEENTVHCLASLS

SEQ ID NO: 608 - protein, 60 aa, Eucalyptus grandis
DGNIEKVLDRGEKIELLVDKTVNLRSQAQDFRQQGPKMRRKMWLQNMKIEADLVLGIIIA

SEQ ID NO: 609 - protein, 133 aa, Eucalyptus grandis
AQRERERENGFAGTTQKCMACEKTVYLVDKLTADNSIYHKACFRCHHCNGTLKLGNYNSFEGVLYCRPHFDQLFKRTGSLEKSFEGTPKIAKPEKPVAGERPAGPKPPVCSGDRETQCVDVRARFPTEKVTVL

SEQ ID NO: 610 - protein, 162 aa, Eucalyptus grandis
MAKEKIKIKKIDNLTARQVTFSKRRRGLIKKAEELSVLCDADVSLIVFSATGKLYDFSSSRQMKGEDLEGLNVEELDQLEKKLEAGLSLVIKNKEEKTWNEINKLQRKEAQLIKQNKQLKHEMKMILHQEKSVTVNSESVKDVYISRNSMPPLDGDSPNPSS

SEQ ID NO: 611 - protein, 43 aa, Eucalyptus grandis
MMAVTSACKDKMGIDNGKYVRYTPEQVEALERLYHECPKPSSL

SEQ ID NO: 612 - protein, 226 aa, Eucalyptus grandis
SAASLKASPFGYPGMRPTRFTGSQIIMPLGHTIEHEEMLEVIRLEGHSLAQEDAFVSRDIHLLQICSGIDENAVGVCSELIFAPIDEMFPDDAPLLPSGFRIIPLDSKSSDVQDSLTTNRTLDLTSSLEVGPASTNCVGDVAPSHGARSVLTIAFQFPFDANTQDNVAVMARQYVRSVISSVQRVAMVISPSGLGPSINPKLSQGSPEALTLANWICQSYRHVLII

SEQ ID NO: 613 - protein, 82 aa, Eucalyptus grandis
RDHWSSFSAPIDEMFPDDAPLLPSGFRIIPLDSKSSDVQDSLTTNRTLDLTSSLEVGPASTNCVGDVAPSHGARSVLTIAFQ

SEQ ID NO: 614 - protein, 234 aa, Eucalyptus grandis
LDLASSLEIGPAGNRSFNDINANSGCTRSVMTIAFEFAFESHMQEHVASMARQYVRSIISSVQRVALALSPSNLGSHAGLRTPLGTPEAQTLARWICHSYRCYLGVDLLKSSNEGSELILKNLWHHSDAIMCCSLKALPVFTFANQAGLDMLETTLVALQDITLEKIFDDHGRKTLCSEFPQIMQQGFACLQGGICLSSMGRPVSYERAVAWKVMNEEENAHCICFMFINWSFV

SEQ ID NO: 615 - protein, 100 aa, Eucalyptus grandis
MAFAGTTQKCMACEKTVYLVDKLTADNRIYHKACFRCHHCKGTLKLGNYNSFEGVLYCRPHFDQLFKRTGSLEKSFEGNPQDLQSPEKPVVERDLQRPKA

SEQ ID NO: 616 - protein, 93 aa, Eucalyptus grandis
MAFKSPGGITWLKHLLVKNFYLGEHLKCRNGLIKKAYELSVLCDIDIALIMFSPSDRVSHFSGKRRIEDVLTRFINLTDQERDTPRCPGSAHT

SEQ ID NO: 617 - protein, 41 aa, Eucalyptus grandis
MGRGRVQLKRIENKINRQVTFSKRRNGLLKKAYELSLLCDA

SEQ ID NO: 618 - protein, 62 aa, Eucalyptus grandis
EISVLCDADVALIVFSTKGKLFEYATDCCMERILERYERYSYAESQVLTNNAETNGNWTLEH

SEQ ID NO: 619 - protein, 86 aa, Eucalyptus grandis
DSSHPQSVSEVNTQFYQQEASKLRRQIREIQVSDRHLLGEGISDLSFKDLKNLESKLEKSISRVRSKKNEMLFAEIEYMQMRGLVQ

SEQ ID NO: 620 - protein, 99 aa, Eucalyptus grandis
ENSRNEWDILSNGGQVQEMAHIANGRDPGNSVSLLRVNNANSSQSNMLILQESCTDSVGAYVIYAPVDIVAMNVVLNGGDPDYVALLPSGFAILPDGPE

SEQ ID NO: 621 - protein, 72 aa, Eucalyptus grandis
TEQVHFLEKNFELENKLEPERKIQLAKDLGLQPRQVAIWFQNRRARWKTKHLEKEYEDLQASYNSLKADCDG

SEQ ID NO: 622 - protein, 79 aa, Eucalyptus grandis
NRQVTFAKRRNGLLKKAYELSVLCDAEVALIIFSTRGKLYEFCSSPSMLKTLDRYQKCSYGSVEVNKPSKELENAYREY

SEQ ID NO: 623 - protein, 242 aa, Eucalyptus grandis
MGRGRLQLKRIENKINRQVTFSKRRAGLLKKAHEISVLCDAEVALIIFSAKGKLFEYSTDSCMERILERYERYSYSEHQVLASETESIGSWTLEHAKLKARLEVLHRNYRHFMGEDLDSLSLKDLQNLEQQLESALKHIRSRKNQLMHESISVLQKKDRALQEQNNLLTRKVKEKERALAQQAQWEQQDHALDSPVVLPHYLPSLDINGSYQARHNGHDDGENLTQPRAGTLLPPWMLHRLN

SEQ ID NO: 624 - protein, 360 aa, Eucalyptus grandis
MKRLGSSDSLGALMSICPPSEELQHSPRNGNPIYHSRDLQSMLELGLDEEGCVEDQSAGGGGHVGGEKKRRLSIDQVKALEKNFEVENKLEPERKVKLAQELGLQPRQVAVWFQNRRARWKTKQLERDYGVLKSSYEALKLSYDALKHDNEALHKEIKELKSKLREEDDNPESNLSVKEEVIIPGHDVSDKIRAADDGDDDTKRSPPPPITAPPRELSFNNGGLKDGSSDSDSSAIVNEENAATSSSSPNPAVQSHGGFLKFMGSSSSSASPPPPPPASFGGCFSFQFQRAYQPQPQPPHHHHHHSPYVKMEEHNFLGGEEDCNFFSQQQAPNPQWERPQQGKRRKTNSPRGRGLQIRDR

SEQ ID NO: 625 - protein, 75 aa, Eucalyptus grandis
MGEESFIYSFVARGTMILAEYTEFTGNFPAIAAQCLQKLPSSNNKFTYSCDHHTFNFLLEDGYAYCVVAKESVGQ

SEQ ID NO: 626 - protein, 53 aa, Eucalyptus grandis
IPFSLFPPQSEGFFNPMDGNLSLQIGYNPTCLDEMNASVSSQNVAGFIPGWML

SEQ ID NO: 627 - protein, 50 aa, Eucalyptus grandis
AGGEPMWIAGPDGSSSVLNEDEYIRAFPRGIVTNPTGFKREPHDKPGSSS

SEQ ID NO: 628 - protein, 232 aa, Eucalyptus grandis
LGTQIPSGIHMPSANLSSISFLGPIPMVSGDGGGRTGSERSRNADCAPAGFPGGDEDVNKGGDIPYGMSTIVRVIPNSRYLRVAQQLLDEIVNVRKALKRSDDANDQSRHENQRSPKDADGGSKNEASSNPQESASNSSELSAAEKQDLQNKLTKLLSMLDEVDKRYKQYYHQMQIVVQSFDTIAGSGAAKPYTALALQRISRHFRCLHDAITGQIQATRKSLGEQDTSTET

SEQ ID NO: 629 - protein, 69 aa, Eucalyptus grandis
LDILEWILELIGVTYRRLDGSTQVTDRQSIVDTFNNDTSIFACLLSTRAGGQGLNLTGADTVVIHDMGF

SEQ ID NO: 630 - protein, 62 aa, Eucalyptus grandis
CWHHVHTQCGKAGFGMLKQENLSNELDRVKKENDNLQIQLRHLRGRHNITEPQRADNPRRHS

SEQ ID NO: 631 - protein, 113 aa, Eucalyptus grandis
GSKELESLERQLDGSLKQIRSRRTQYMLDQLTDLQHREQLLHEANRTLNQRLMEGYQVNALQLNQHAEEVGGYGHPPPPPLPPQPLAQPHSEAFFIPWNVNPLCKWDTSPIQC

SEQ ID NO: 632 - protein, 393 aa, Eucalyptus grandis
MVEGERNGDDDGASQGEQQWKHQQALDRLGKYVRYTAEQVEALERVYSECPKPSSLRRQQLIRECPILSNIEPKQIKVWFQNRRCREKQRKEASRLQTVNRKLTAMNKLLMEENDRLQKQVSQLVCENGYMRQQLHTTSATTTDASCDSVVTTPQHSLRDANNPAGLLSIAEETLAEFLSKATGTAVDWVQMPGMKPGPDSVGIFAISQSCSGVAARACGLVSLEPTKIVEILKDRTSWFRDCRSLEVFTMFPAGNGGTIELVYTQIYAPTTLAPARDLWTLRYTTTLENGSLVVCERSLSGSGAGPNPASAAQFVRAEILPSGYLIRPCEGGGSIIHIVDHLNLEAWSVPEVLRPLYESSKVVAQRITIAALRYIRQIAQETSGEVVYGLGR

SEQ ID NO: 633 - protein, 84 aa, Eucalyptus grandis
MGIDDLCNTGLVLSLGLETPFKIEAQRQAKQRLNFEPSLTLCLSGTTKATRDEQPPADHLYRQASPHSHNSLSAVSSFSSPRVK

SEQ ID NO: 634 - protein, 67 aa, Eucalyptus grandis
ESGEARRLRDSLVEMANVGKSPSMLTECGLAENSLVSIAERVTHHRWSWSEVKYLSDCHLMALDASL

SEQ ID NO: 635 - protein, 103 aa, Eucalyptus grandis
YSEASSDEGNQYSTREEEGEIEEFEEDTYSGAPGALPINKDQSDEDVPAEECDEYPWTSERTRNNHLPEEAGFSGSSADSPRGIRMASPSASSQKFGSLSALD

SEQ ID NO: 636 - protein, 299 aa, Eucalyptus grandis
MAFHNHLSHQDLSSLHHFAADQQPPPPQHQQQQQHLPDSSSSVHHQLHHAAGPNWLNTALLRSDAAAAAAAAAGGNSFLNLHTSSDSAASPQAQQQPPATSASAAAGHHQWLSRQHSSLLQRNHSEVIDADSIIDSADLKESVSKGDGGGGGAAESNWENAKYKAEILAHPLYEQLLSAHVACLRIATPVDQLPRIDAQLAQSQHVVAKYSAMSQGLVADDKELDQFMTHYVLLLCSFKEQLQQHVRVHAMEAVMACWEIEQSLQSLTGVSPGEGTGATMSDDEDDQVDSDANLFDGSL

SEQ ID NO: 637 - protein, 91 aa, Eucalyptus grandis
MGRRKIEIQPITHERNRSVTFLKRKNGLFKKAYELGVLCSVDVAVIIFEDRPGHSPKLYQYSSRGIQDIVQRHLHHDGETDNRGPGDFSGA

SEQ ID NO: 638 - protein, 129 aa, Eucalyptus grandis
MFSTGEYSAAAFEGMDSLPSPRKKKNQLVNRRRFSDEQIRSLESIFESESRLEPRKKLQLARELGLQPRQVAIWFQNKRARWKSKQLERDFAILRANYNALYSRFESLKKEKQSLVTQIEKLNQLVEKP

SEQ ID NO: 639 - protein, 101 aa, Eucalyptus grandis
MLYRGGMRTPNAQQIEQITAQLSKYGKIEGKNVFYWFQNHKARERQKQKRNSLGLSHCSRTPTTAATIATVTLNTTKVHRTILPYFFPHSGIGVRALHDAC

SEQ ID NO: 640 - protein, 85 aa, Eucalyptus grandis
TPSSPASDQILSSCTPQDFHGVASLLGKRSMSFTGIDVGDDPNINNGNVNGEEDLSEDDGSQPGGEKKRRLNMEQVKTLEKNFEL

SEQ ID NO: 641 - protein, 162 aa, Eucalyptus grandis
GKATASGGGGGYMSSPVPLGPFTGYASILKGSRFLRPAQQLLEELCEAGRAICTEKMTDDSCAMTEPAMDSLSGGCGIGMDDGCGGDGGEFRRKKSRLISMLDEVCRRYKQYCQQMQAVVASFECVAGLSNAAPYANLALKAMSKHFKCLKNAIADQLQFTN

SEQ ID NO: 642 - protein, 155 aa, Eucalyptus grandis
MGQQSLIYSFVARGTVILAEYTEFTGNFTSIASQCLQKLPATNNKFTYNCDGHTFNYLVENGFTYCVVAAESAGRQIPIAFLERIKDDFNKRYGGGKATTAAANSLNREFGPKLKEHMQYCVDHPEEISKLAKVKAQVSEVKGVMMENIEKVLDR

SEQ ID NO: 643 - protein, 54 aa, Eucalyptus grandis
EWWSVHNKWPYPTEADKIALAKSTGLDQKQINNWFINQRKRHWKPSEITHYKVI

SEQ ID NO: 644 - protein, 308 aa, Eucalyptus grandis
MAMQTGIGLSKILVLAGAGYTGTILFQNGKLSDLLGELQGLVKGLEKSGSQSDGDKDYSDAVAAQVRRLAMEVRQLASARQITVLNGNSSQMGNLTNMVVPAATLGALGYGYMWWKGLSFSDLMYVTKRGMANCVANLTQHLEHVSEALNSVKKHLTQRIENLDGKMDDQRELSKEIKNEVSSVKANLDGLGDDLDFLQRMVSGLDVRMGSLEYKQDWANEGVRYLCGVASGQKVEMPKMLQEQIKISGTSRGLLSYQDTPSLKGLKEIADALTLSIDRSASDAVVQDGVERLNGKPKPLPRASSTTC

SEQ ID NO: 645 - protein, 197 aa, Eucalyptus grandis
MEEYGQMNENSSTGSRGNNSFLYASPVLGPSSSGNSNYGRGNSSGGHFYSQSGDHCFQSEAPPHPVVKTEATTSHHGHAQKFHHYSLVRDHHDPSASHHHHHQHHQHQQLQTASESSREVDAMKAKIIAHPQYSNLLEAYMDCQKVGAPPEVVAKLSVARQEFESRQRSSVASADGSKDPELDQFMEAYYDMLVKYR

SEQ ID NO: 646 - protein, 304 aa, Eucalyptus grandis
EEGEDEQVLQPKIKRKRSLRVRPRHTMERPEEKSSNGALPVQCGDSAFLPLQMDHKYQPQSRTASETNPFGEPTASKHGHGGPSMKSKRQTSLRRINDPSKLHPLPKSSRSNHISSSDAAAERSRENWNGRVANPSGNSSVGAGLSEIIQRKCKNVVSKLQRRIDKEGHHIVPLLTDLWKRMGSPGHMGGVGSNLLDLRKIDQRIEKLEYGDVMDLVLDVQLMLKGAMQFYGFSHEVRSEARKVHDLFFDILKIAFPDTDFEEVRNALSFSGPGAASQSAPSPKQASAGQSKRHRALNEVDADK

SEQ ID NO: 647 - protein, 166 aa, Eucalyptus grandis
VVGKALQKCAKISTDLKKALYGSSVASCEHYSEVEASSNRIVTQDDVDAACGADDTDFQPVLKPYQLVGVNFLLLLHRKGVGGEGQGVLKYDTSLANGASLYSMQAILADEMGLGKTIQAITYLTLLKHLNNDPGPHLVVCPASLLENWERELKRWCPSFSVLQYH

SEQ ID NO: 648 - protein, 142 aa, Eucalyptus grandis
MFMVDDHALCLSCNCTFNILACCNCSYPKDSDKHMLAKQAGLTRSQVSNWFINARVRLWKPMVEEMYLEETKSREQAGSENGTTRRAATKSNKDAAGLKSASQEDNAFGMNSSIKSFQSSPNKALNQAAISPSENSNSTSST

SEQ ID NO: 649 - protein, 131 aa, Eucalyptus grandis
GAPASGQSSHALQVEETRDSPLGFVVKVEDRLSSGSGGSAVVDEDGPQLVDSGHSYFHCNDYPGSLVAVNGLQSEDDGSDDSRGYCSEIFAAAEEPHQEGGVPNGVVGVALVLGFRLLVCSRKWFKSNMCS

SEQ ID NO: 650 - protein, 152 aa, Eucalyptus grandis
SRLQAVNRKLTAMNKLLMEENDRLQKQVSQLVYENSYFRQQTQNATLATTDTSCESVVTSGQHHLTPQHPPRDASPAGLLSIAEETLTEFLSKATGTAVEWVQLPGMKPGPDSIGIIAISHGCTGVAARACGLVGLEPSRVAEILKDRPSWY

SEQ ID NO: 651 - protein, 151 aa, Eucalyptus grandis
DDVCGGGKRPERPFFCTYDGEENGDDDYDEYLHQPEKKRRLSIEQVLYLEKSFETDNKLEPDKKVQLAKELGLQPRQVAIWFQNRRARWKTKQMEKDFDKLQASFNCLKSDYESLLNEKEKLKAEVIHLTHQLEQRSNGILNHSTYLNNCT

SEQ ID NO: 652 - protein, 85 aa, Eucalyptus grandis
TAKLKSSIFLLPLHQRLILKKIERQQVFRDGFLVLLEGGLAMGIEEATKRQSIFSYPEDLYNEEYYDDQAPEKKRRLTPEQVHLL

SEQ ID NO: 653 - protein, 99 aa, Eucalyptus grandis
MEWEKQEQHHPHHHHHPHHHPQQQQQHHQQQQQPQQQQQAKEAQQQQQQQGGEGMGNGTAAGNGGGVLYVKVMTDEQLETLRKQIAVYASICEQLVEMH

SEQ ID NO: 654 - protein, 150 aa, Eucalyptus grandis
ARGPVLLAEYTEFSGNFTSVASQCLQKLPATSNKFTYNCDGHTFNYLVDDGLTYCVVAVESVGRQIPMAFLERIKEDFTHRYDAGKAATASANSLNREFGPKLKEHMQYCVDHPEEISKLAKVKAQVSEVKGVMMENIEKVLDRGEKIEL

SEQ ID NO: 655 - protein, 96 aa, Eucalyptus grandis
LQYDWHHLSFCVIISVLNLQNTINGSCSMESILERYERYTYAERQQVATDSPQVQGSWSLEYPKLVARIEVLQRNIRNLSGEELDPLSLRELQYLE

SEQ ID NO: 656 - protein, 338 aa, Eucalyptus grandis
MATYYHQSSSDPDGALQTLVLMNPASYVHYSDAPPPHQQPSAIFLNSSTAGPPASQTQQFVGIPLPGSAADSQPSSMHVNHDLSSMHGFMPRVQYNLWSSLDPSTAAREASRTHQQQGLSLSLSPQQPPPTPAGYRSFVRAERSGDGAAGSQHPPAISGGEDVRISGGSPSSASGVTNGAAVGSGMQGVLLSSKYLKAAQELLEEVVNVGNTGIKAEMLKKASGQSKPGGESAALKEEGGGDGSGKRGAELSMAERQEIQMKKAKLINMLDEVEQRYRQYHNQMQIVISSFEQAAGIGSARTYTALALQTISKQFRCLKDAIAGQIRAANKSLGEEDG

SEQ ID NO: 657 - protein, 123 aa, Eucalyptus grandis
VEQVQFLEKSFEVENKLEPDRKIQLAKDLGLQPRQVAIWFQNRRARWKTKQLEKDYETLQASFNTLKSDYDTLIKERNDLKAEVLNLTDKLLHKGNEKESSESSSKSSQGLFQNPIADSVSED

SEQ ID NO: 658 - protein, 128 aa, Eucalyptus grandis
AIISSDQMERRMLEAARKGNVHELEDLISSNELILEEMDLEGAGHTPLHVACVAGHLDFVRELLKRTPKLAEKVNTDGFSPLHIAAARGDVEIARELLTMGPHLCSVKGRERRIPLHYAAMNGKVDVM

SEQ ID NO: 659 - protein, 159 aa, Eucalyptus grandis
RLSKDQSAVLEESFKEHNTLNPKQKLALAKQLGLRPRQVEVWFQNRRARTKLKQTEVDCEYLKRCCESLTEENRRLQKEVQELRALKLSPQFYMHLSPPTTLTMCPSCERVAAPSPPSAVGRPLAAVPAHPRPVPLINPWAPAAALEIVDPPGLQEFDI

SEQ ID NO: 660 - protein, 115 aa, Eucalyptus grandis
MAREKIKIKKIDNVTARQVTFSKRRRGLFKKAGELSVLCDAEVAVVIFSATGKLFEYSSSSMKDTLERYTLHHNNLENMDQPSLELQLEHSNNMRLSKEVAEKSHRLRQLRGEDL

SEQ ID NO: 661 - protein, 118 aa, Eucalyptus grandis
QVAVWFQNRRARWKTKQLERDYDYLKSSYDSLLSDYDSILKENEKLKLEVYSLTEKLQGKEVDGAPMTGPSEPAPLEEADVQAVQFSAKVEDRLSTRSGGSAVIDEEGPQLVDSGNSY

SEQ ID NO: 662 - protein, 74 aa, Eucalyptus grandis
MEAGRFLFDPPALQGNILFLDKGSRSMMGMEESPKRRRFFCSPDELFDEEYYDEQMPEKKRRLTPEQVLLLEKS

SEQ ID NO: 663 - protein, 152 aa, Eucalyptus grandis
MYGLCGGGGGGGGGGGEEYSERALMSPENLVLPSEYQAWLCSAGFRDNRIPMYGFGSEEFVSSASGMSETASVTPDQEDAAETAIKSKIKSHPSYPRLLHAYIDCQKVGAPPEVVGLLDEIRPENGVCKRDAAVSTCLGADPELDEFMETYT

SEQ ID NO: 664 - protein, 56 aa, Eucalyptus grandis
MALAMHRECSSKQMDASKYVRYTPEQVEALERVYNECPKPSSLRRQQLIRECPILC

SEQ ID NO: 665 - protein, 135 aa, Eucalyptus grandis
MAGEEPYSADTNSDTFADEETLIPSSSEALESAWVPTSSTAHHGSKSVVNFEDVCGGGDTNTAPRPYLRQIDLKEEAVEEDYGDGNFQPPGKKRRLSADQVHFLERHFEVENKLEPERKIQLAKDLGLQPRQVAI

SEQ ID NO: 666 - protein, 226 aa, Eucalyptus grandis; identical to SEQ ID NO: 612

SEQ ID NO: 667 - protein, 147 aa, Eucalyptus grandis
VLLRFLTTATTICNNNAGGSGSGSGSGCFFMDNDVKAKIMAHPHYHRLLSAYVNCQKVGAPPGVVAKLEEACASAAIMAGNSGMSNTGCIGEDPALDQFMEAYCEMLTKYEQELSKPFKEAMLFLQRIECQFKALTLGVPSDSVALS

SEQ ID NO: 668 - protein, 176 aa, Eucalyptus grandis
GSSKGVGIPRLRFLDQQLRQQRALQQLGMMQQHAWRPQRGLPESSVSILRAWLFEHFLHPYPKDSDKILLARQTGLTRSQVSNWFINARVRLWKPMVEEMYKEEIGDAEMDSNSSSDTAKPKTGDIKSSMEDRVEEVQQSSTATQRCSSGQLMDSSFDRTPDVEMAGHSVGFNYLN

SEQ ID NO: 669 - protein, 294 aa, Eucalyptus grandis
MSEVQVTQMKSDGTLEESGEARRLRNSLEEMANEGKSPSILKECGLPENSFVSIPQKMTENRWSWSEVKYLSNCLLLALDASLEHSLLGSLMNMDRYAAAESYHKLAMAFAPVPDLHIMWLLHLCDAHQEMQSWAEAAQCAVAVAGVVMQALVARNDGVWSKDHVTALRKICPMVSSEISCEASAAEVEGYGASKLTVDSAVKYLQLANKLFSQAELYHFCASILELVIPVYKSRRAYGQLAKCHTLLTNIYESILEQESSPIPFTDATYYRVGFYGEKFGKLDRKEYVYREPR

SEQ ID NO: 670 - protein, 144 aa, Eucalyptus grandis
HTKTHHHHSIAISNPTKSMSQDYHHPSIFAFSNNGFERPDVAAASAASDQEQQHHVAQQICRDKLRVQGFDQPPPPQLVGMEEEPGGLPAYETAGMLSEMFNFPPGGAAAAELLEQPMASGYRAARPSLPTVSGTAQKTQVCIG

SEQ ID NO: 671 - protein, 125 aa, Eucalyptus grandis
IVDHMDLEPWSVPEVLRPLYESSTLLAQRTTMAALRNLRQISQEVSQPNVTGWGRRPAALRALGQRLSKGFNEAVNGFMDDGWSMLESDGVDDVTLLINSSPAKMAGVNISYASGFPSMTSAVLC

SEQ ID NO: 672 - protein, 104 aa, Eucalyptus grandis
MATAFAGTQQKCKACDKTVYLVDQLTADNKVFHKACFRCHHCKGTLKLSNYCSFEGVLYCKPHFNQLFKMTGSLDKSFEGTPKTVNRSSEQGQSNAKVSSMFAG

SEQ ID NO: 673 - protein, 131 aa, Eucalyptus grandis
DDDEDDDLFQDRFSIAYNLDREFGPRLKEHMQYCMSHPEEMSKLSKLKAQISEVKGIMVDNIEKVLDRGERIELLVDKTENLQFQADIFQRQGRQLRRKMWFQNLQMKVVVAGAVVIVIFLLWLIAKWGSK

SEQ ID NO: 674 - protein, 90 aa, Eucalyptus grandis
MATAFAGTQQKCKACDKTVYLVDQLTADNKVFHKACFRCHHCKGTLKLSNYCSFEGVLYCKPHFNQLFKMTGSLDKSFEGTPKTVNRSSE

SEQ ID NO: 675 - protein, 95 aa, Eucalyptus grandis
VYAPIDSTAMTIALSGEDTSTVQILPSGFTISSDGRIGTSSSKPAGTLLTVAFQILVSSHSGPEQLSVESVATVNTLISATVQKIKAALNWSAAE

SEQ ID NO: 676 - protein, 141 aa, Eucalyptus grandis
QMERAARKGNIHELNDLISSNEQILEEMALEGAGHTPLHIACMGGHLDFIRELLKHMPKLAEKVNPCGFSPLHIAAARGDVEIAKELLKVNTDLCSVEGRERRIPLHDAVIHGEVDVMEILLSTSPESVEKKTARKETVLH

SEQ ID NO: 677 - protein, 121 aa, Eucalyptus grandis
PSDIFLLQLCNGVDENAVGTCAELLFAPIDASFSDDAPIIPSGFRIIPLDPGSDAFSPNRTLDLASALDVGPTGNKAVGDNSGHSGNTKSVMTIAFQFAFELHLQENVASMARQYLRSIIA

SEQ ID NO: 678 - protein, 34 aa, Eucalyptus grandis
MGIDDLCNTGLVLSLGLETPFKIEAQRQAKQRLN

SEQ ID NO: 679 - protein, 110 aa, Eucalyptus grandis
INAPESDPSLTPAINRHPFSETQATTLLQATTAMISSAVQVAGPAHIDDPCRRSIGGSTGLGGATDIGSALIRFGTAAAATGDVSLTLGLRHAGNVPEKSSFSVTDLGGC

SEQ ID NO: 680 - protein, 146 aa, Eucalyptus grandis
FNEGNGTPSKQKIKEITTELSQHGQISETNVYNWFQNRRARSKRKMQNATGNNTESEAEAEVESPKEMKTKPEIFQSQQNPVSRNEDLCFQSPEISSDLHFADSQTKVESMVYPDGSLRSRNRNLGQLSFYDAMMSNSGGLAGNEH

SEQ ID NO: 681 - protein, 247 aa, Eucalyptus grandis
PIDESFADDAPLLPSGFRVIQLDPKTDGPAPTRTLDLASTLEVGSGGARPTCEADASTYNLRSVLTIAFQFVFENHLRDTVAIMARQYVRSVVGSVQRVAMAIAPSRLGGHLGPKSLSGSPEALTLARWICRSYRICAGAELLRGDSQAGDAVLKEFWHHSDAIMCCSVNTNVASPVFTFANQAGLDMLETTLVALQDIMLEKVLDEGGRKVLSSEFPKIMQQGIAYLPAGVCISSMGRPVAYEQAV

SEQ ID NO: 682 - protein, 147 aa, Eucalyptus grandis
VRLTKEQSALLEESFKQHSTLNPKQKQALARQLNLRPRQVEVWFQNRRARTKLKQTEVDCEFLKKCCETLTDENRRLQKELQELKALKLAQPFYMHMPAATLTMCPSCERIGAGPSVDGAAPTKGPFSMTTKSHLYSHHFTNPSAAC

SEQ ID NO: 683 - protein, 121 aa, Eucalyptus grandis
PLEFHNDVRLTFSNAMTYNPPSNDVHLMADTLNKFFDIRWKTIEKKLVVGGPQPSSTKSAPPEEVKAAKSTALPKKRKMSSQQEVMPAPLLQVMTDEEKHKLGQELESLLGEMPENIIDFL

SEQ ID NO: 684 - protein, 36 aa, Eucalyptus grandis
MQLYAPTTLAPARDFWLLRYTSVMEDGSLVVCERSI

SEQ ID NO: 685 - protein, 120 aa, Eucalyptus grandis
RELKTQLLRKYSGYLGSLKQEFMKKRKKGKLPKEARQQLLDWWSRHYKWPYPSESQKLALAESTGLDQKQINNWFINQRKRHWKPSEDMQFVVMDATHPHYYMDNMLGNPFPMDISPTLL

SEQ ID NO: 686 - protein, 93 aa, Eucalyptus grandis
WPFKEPVDAREVPDYYDIIKDPMDLKTMTKRVESEQYYVTLEMFIADVKRMFANARTYNSPDTIYFKIATRLEAHFQSKVQSNLQSGAGKIQQ

SEQ ID NO: 687 - protein, 185 aa, Eucalyptus grandis
MGRGKIEIKRIENTTNRQVTFCKRRNGLLKKAYELSVLCDAEVALIVFSSRGRLYEYSNNSIRSTIERYKKANSDSSNTSTVTEINAQYYQQESAKLRQQIQMLQNSNRHLMGDSLSSLSVKELKQLENRLERGITRIRSKKHEMLLTEIEYLQKKEIELENESVFLRTKIAEVDRIQQGNMVAA

SEQ ID NO: 688 - protein, 130 aa, Eucalyptus grandis
MGRGKIEIKRIENANSRQVTFSKRRSGLLKKAQELSILCDAEVAVIIFSNTGKLYEFSSSGMKQILSRYNRCQDSPESTVVEYKPESTKEDDKVVDTLKDEIAELQMRQLRLLGKDLNGLSIKELQHLEQ

SEQ ID NO: 689 - protein, 117 aa, Eucalyptus grandis
LDTALKRIRTRKNQLMHESISQLQKKEKSLQEQNNVLSKKIKENEKVMRESGQWEQQTPAPTTSSFMLQPTLPLPSLTIGNTFQTPHVLGGAEQEERSQARPANTLMPPWMIRRSNE

SEQ ID NO: 690 - protein, 140 aa, Eucalyptus grandis
YLSDLMSSGHKHKRRKQLQTVELKVRMDCDGCELKVRKALSSLDGVKTVEINRKQQKVTVNGYVDQNKVLKRAKSTGKKAEIWPYIPYSVVAHQPYIAQSYDKKAPPGHVRKVEPTATSAIVTRHEDPYMTLFSDDNPNA

SEQ ID NO: 691 - protein, 68 aa, Eucalyptus grandis
RIENKINRQVTFAKRKNGLLKKAYELSVLCDAEVALIIFSSRGKLHEFCSGPRYRVFVCYHLFFSLML

SEQ ID NO: 692 - protein, 140 aa, Eucalyptus grandis
INAGRFDQRTTHEERRLTLETLLHDEERYQETVHDVPSLQEVNRMIARSEEEVELFDQMDEELDWTEEMTNYELVPKWLRASTKEVNAAIATLSKKPSKNTLFASTIVEPNEPVSESVRKRGRPKSKKHPNYKELDDDNE

SEQ ID NO: 693 - protein, 126 aa, Eucalyptus grandis
AAQLKHSCELLGEKDGAGSSGITKGETPRLKLLDQSLRQQRAFHQMGMMEQEAWRPQRGLPERSVNILRAWLFEHFLHPYPSDADKHLLARQTGLSRNQVSNWFINARVRLWKPMVEEMYQQESKE

SEQ ID NO: 694 - protein, 53 aa, Eucalyptus grandis
FCSMLKTLERYQKCNYGALEPNVSARESLELSCQQEYLRLKARYEALQRTQRY

SEQ ID NO: 695 - protein, 86 aa, Eucalyptus grandis
KIEDVREEILRKRRAGKLPGDTTSVLKNWWQQHSKWPYPTEDDKAKLVEETGLQLKQINNWFINQRKRNWHNNSQSVTSLKSKRKR

SEQ ID NO: 696 - protein, 99 aa, Eucalyptus grandis
PVDITGMQAVMTGCDSSNIAALPSGFSILPDGIESRPLVISSRHEEKSSEGGSLLTIAFQILTNTSPTAKLTVESVESVNTLISCTLRNIRTSLQCEDG

SEQ ID NO: 697 - protein, 134 aa, Eucalyptus grandis
ENKINRQVTFAKRRNGLLKKAYELSVLCDAEVALIIFSHRGKLYEFCSSSSMLKTLERYQKCNYGAPEPSISTREAQLELSSQQEYLKLKARYEALQRTQRNLLGEELGPLSSKELESLERQLDSSLKQIRSTR

SEQ ID NO: 698 - protein, 145 aa, Eucalyptus grandis
MQEPNLAMMGGGGGGGGGGGGIVGGGGGGLGSEASFSGDHPQRQLKGEIASHPMYEQLLSAHVACLRVATPIDQLPLIDAQLAQSHHLLRSYASSVQHGHSSLSPHDRQELDHFLAQYLVVLCSFKEQLQQHVRVHAVEAVMACR

SEQ ID NO: 699 - protein, 160 aa, Eucalyptus grandis
HPDEKQRQQLSKQLGLAPRQVKFWFQNRRTQLKAIQERHENSLLKTEMEKLRDENKAMRDTIQKSCCPNCGSATTSRDTALTTQEQQLRIENARLKAEVEKLRTALGKYTPGTASPSCSAGNDQENRSSLDFYTGIFGLDKSKIMELVNQAMEELKKMAT

SEQ ID NO: 700 - protein, 72 aa, Eucalyptus grandis
PTTRTPGTKKKKSSNKKSLQGERERARTQETLNLSSPVSSKRAREKEREREREREREGVEVEERAREEEGVY

SEQ ID NO: 701 - protein, 205 aa, Eucalyptus grandis
LIRPCEGGGAIIHIVDHVDLDAWSVPEVLRPLYESSKILAQKMTVAALRHIRQIAQESSGEIQYGGSRQPAVLRTFSQKLCRGFNDAVNGFVDDGWSVLSSDGVEDVTIAVNSSPNKFLGSQYNATIFPNFGRGVLCAKASMLLQNVPPAVLVRFLREHRSEWADHGIDAYSAASLKTSSYAIPCVRPGGFPSSHVILPLAHTVE

SEQ ID NO: 702 - protein, 126 aa, Eucalyptus grandis
LFEHFLHPYPKDSDKVMLAKQTGLTRSQVSNWFINARVRLWKPMVEEMYTEEIKEQEQNGGGAEEKPSKSEREDSASKSSGLQDKAPNSNENSTKSFKPKEITSRNHDTPAISTNSASSIGGNVRS

SEQ ID NO: 703 - protein, 116 aa, Eucalyptus grandis
DKLMKHEYGWVFNTPVDVKGLGLHDYYSIIKHPMDLGSVKTRLNRNWYKSPKEFAEDVRLTFRNAMTYNPEGQDVHVMAEILYKIFEDRWAIIESDYNREMRFALDYDMGLPTPTS

SEQ ID NO: 704 - protein, 116 aa, Eucalyptus grandis
PSYGNGYSPPQYGNGPAYHPMPTYYPMGYRICAGCNTEIGHGRFLSCMNAVWHPECFCCRACTLPISDYEFSLSGNYPYHKSCYKEHYHPKCDVCSHFIPTNLAGLIEYRAHPFWS

SEQ ID NO: 705 - protein, 96 aa, Eucalyptus grandis
TWPEDICSVKSDMFDSESPHYTDAAHSSLLEPGDSSYAFEPDHSDLSQDEEDNLSKSLLSTRNYPKLENSDYAILPPNSCNFGFHAEDPAFWPWSY

SEQ ID NO: 706 - protein, 149 aa, Eucalyptus grandis
EGKLGHSNSSNSLDNGKYVRYTPEQVEALERLYHECPKPSSLRRQQLIRECPILSNIEPKQIKVWFQNRRCREKQRKEASRLQAVNRKLTAMNKLLMEENDRLQKQVSQLVYENGYFRQHTQNTTLATKDTSCESVVTSGQHQLTSQHP

SEQ ID NO: 707 - protein, 134 aa, Eucalyptus grandis
EENMQHLKDEAANMMKKIELLEDSRRKLLGEGLGSCSIEELQQIEQQLERSVISIRARKTQVFKEQIDKLKEKEKMLTAENAILTEKCGIKPPQRANECRDSPLLRESTPSSEVETGLFIGPPETRSRRLPFQN

SEQ ID NO: 708 - protein, 124 aa, Eucalyptus grandis
DKDPKRPVRDPVFAAVPDKFVASMMKRCGLILTKVMKHKHGWVFNTPVDAVGLGLHDYHQIIKNPMDLGTVKTNLERNFYHSPQEFAADVRLTFNNALTYNPKGHDVHHMAETLLVQFDQMFDP

SEQ ID NO: 709 - protein, 126 aa, Eucalyptus grandis
VSLSRVEKHASSAMNKLHEAAMKGDLAALQDLLLQDPQILHKTTSSSSDGTPLHVSCLSGHASFTKHLLTHNPELAKEADSRGSLPLHVACAKGDVEIVRALVAVDPAGCLRYDREGRTPLHLAAI

SEQ ID NO: 710 - protein, 137 aa, Eucalyptus grandis
DDLDNERASSRGGGSDEEDGDMSRKKLRLSKDQSAVLEESFKEHNTLNPKQKLALAKQLGLRPRQVEVWFQNRRARTKLKQTEVDCEYLKRCCESLTEENRRLQKEVQELRALKLSPQFYMHLFPSTTLTMCPFCER

SEQ ID NO: 711 - protein, 104 aa, Eucalyptus grandis
ADYDEGGDDNPGSRHPVTRQFFPVEEEEELEEDGERAGMGGAAVPPGFPRAHWVGVRFRQSDHHPIGSGKGSPILEGSQPMKKIRKGPRSRSSQYRGVTFYRRT

SEQ ID NO: 712 - protein, 138 aa, Eucalyptus grandis
DDLDNERASSRGGGSDEEDGDMSRKKLRLSKDQSAVLEESFKEHNTLNPKQKLALAKQLGLRPRQVEVWFQNRRARTKLKQTEVDCEYLKRCCESLTEENRRLQKEVQELRALKLSPQFYMHLSPPTTLTMCPSCERV

SEQ ID NO: 713 - protein, 128 aa, Eucalyptus grandis
ESQKLMEAVQNGDVSAAVDLLDQDPLLLDRIIVLGVSDTPLHAASVLGHADLVRELLRRAPRLASEQDSRGNSPLHLAAGKGHGEIVGELLSADPAAASARNLDGRAPIHVAAIKGRVDAVGRMVGAV

SEQ ID NO: 714 - protein, 93 aa, Eucalyptus grandis
YSGYLSSLKQELSKKKKKGKLPKEARQKLLSWWELHYKWPYPSETEKVALAESTGLDQKQINNWFINHVIECWVKSMATLMQEIFLMTKVILR

SEQ ID NO: 715 - protein, 127 aa, Eucalyptus grandis
TFSFGILKAGEGGDGVADDELGVTRQLFPVREVDADMEWCGESSSLDKRSDVFLVGACKEKEGPRLAMPQQRRKSRRGPRSRSSQYRGVTFYRRTGRWESHIWDCGKQVYLGGFDTAHAAARPMIEL

SEQ ID NO: 716 - protein, 35 aa, Eucalyptus grandis
SEDMQFMVMDGLHPQGAALYMDGHYIGDGPYRLGP

SEQ ID NO: 717 - protein, 179 aa, Eucalyptus grandis
AAFEGMDSLPSPRKKKNQLVNRRRFSDEQIRSLESIFESESRLEPRKKLQLARELGLQPRQVAIWFQNKRARWKSKQLERDFAILRANYNALYSRFESLKKEKQSLVTQIEKLNQLVEKPQGEGQSCGHDLATNSTDRESDNGVPKYEDSQPVFPDKLTRLMGIPCEDDYFGLKRAEPP

SEQ ID NO: 718 - protein, 142 aa, Eucalyptus grandis
NLTDKLLHKGNEKESSESSSKSSQGLFQNPIADSVSEDEVSRVPIPTWPEDICSVKSDMFDSESPHYTDAAHSSLLEPGDSSYAFEPDHSDLSQDEEDNLSKSLLSTRNYPKLENSDYAILPPNSCNFGFHAEDPAFWPWSY

SEQ ID NO: 719 - protein, 207 aa, Eucalyptus grandis
EKRTPKKRGRKPGLGRDTPLNHVEAERQRREKLNHRFYALRAVVPNVSRMDKASLLSDAVSYINELKSKIGDLESQLQRESKRVKQEVTDATDNLSTTTSVDHSSPSGCGGSLLEVEVKIVGCDAMIRVQSENANYPSARLMAAMRDLELHIHHASLSTVNDLMLQDVVVSVPEGLKGEEDLRAALLRALEQRSEKLPGEREREYVL

SEQ ID NO: 720 - protein, 128 aa, Eucalyptus grandis
EDDKLGRNRASANVVQSSSVKGRPSGGTLVVCPTSVLRQWGDELKNKVSEKAKLSVCMYHGTTRTKDPYELANYDVVLTTYSIVSMEVPKPAGFKDEKDSLQDDDDAFFGRKRKHSAKSEKRRLKKEM

SEQ ID NO: 721 - protein, 114 aa, Eucalyptus grandis
FRLFINWLLDFNSADSAIDSAHFQILTAFANAFHALQPLKVPAFSFAWLELVSHRSFMPKILSGNSQKGWPYFQRLLVDLFQYMEPFLRNAELGLPVHFLYKGTLRVLLVLLHD

SEQ ID NO: 722 - protein, 183 aa, Eucalyptus grandis
MNRERLMKMAGSVRTGGKGTMRRKKKAVHKTTTTDDKRLQSTLKRIGVNAIPAIEEVNIFKDDVVIQFLNPKVQASIAANTWVVSGSPQTKKLQDILPGIINQLGPDNLDNLRKLAEQFQKQVPGAATGSGATGMQDDDDDEVPELVPGETFEAAAEEGQATQVTEATQVTEATKVTEATPAS

SEQ ID NO: 723 - protein, 54 aa, Eucalyptus grandis
GSCQKGDSCEYAHGVFESWLHPAQYRTRLCKDETGCARKVCFFAHKPEELRPVY

SEQ ID NO: 724 - protein, 124 aa, Eucalyptus grandis
MASSSGTSSGSTLIQNSGSEESLQALMDQRKRKRMISNRESARRSRMRKQRHLDDLMLVVAQLRKDNQQLRDNVNVVNQHYMTLETENSILRVQMNELTNRLESLKDILGILDAGDGGRPGNGG

SEQ ID NO: 725 - protein, 120 aa, Eucalyptus grandis
MTDGHLFNNISLGGRGGSNPGQIKIFSGGISWRRQGGGKAVEVDKSDIVGVTWMKVPRTNQLGVRTKDGLHYKFTGFRDPDVISLTNFFQNTCGLTPEEKQLSVSGRNWGEVDLSGNMLT

SEQ ID NO: 726 - protein, 58 aa, Eucalyptus grandis
RLGPMGPKTLCNACGIRYKTGRLFPEYRPSASPTYVPSLNIVSNEIPSSHLWLSLLQK

SEQ ID NO: 727 - protein, 78 aa, Eucalyptus grandis
GVAIDVKIMGWDEVVRVESGRKDHPAARLMVALQELNLELQHASVSVVNELMIQQATVKMGSQLYTQEQLKAALLAVI

SEQ ID NO: 728 - protein, 123 aa, Eucalyptus grandis
KPPMKKQKSKPAAASETAGPARRCSHCGVQKTPQWRAGPNGAKTLCNACGVRFKSGRLYPEYRPACSPTFSSELHSNHHRKVLEMRRKKESMTTTALGQPEPGRARAQLLRARVGSSWRPREI

SEQ ID NO: 729 - protein, 213 aa, Eucalyptus grandis
AAGLLRCGKSCRLRWINYLRPDLKRGNFTEEEDEIIIKLHSLLGNKWSLIAGRLPGRTDNEIKNYWNTHIRRKLLNRGIDPATHRLINEPAQDHHDEPTISFAANSKEIKEMKNNAELNFMCNLEESADVASSARERCPDLNLELGISPPSHQLHQPEPLLRFTGRKSDLCLECNLGLKNSQNCRCSVGVIESETSVGYDFLGLKASVLDYRS

SEQ ID NO: 730 - protein, 61 aa, Eucalyptus grandis
MSVLSKSDSVEIREVWEYNLEDEFSFIREIVDDYPYIAMDTEFPGMVLRPVGNFKSSSESH

SEQ ID NO: 731 - protein, 94 aa, Eucalyptus grandis
MRRKKKAVHKTTTTDDKRLQSTLKRIGVNAIPAIEEVNIFKDDVVIQFLNPKVQASIAANTWVVSGSPQTKKLQDILPGIINQLGPDNLDNLGS

SEQ ID NO: 732 - protein, 103 aa, Eucalyptus grandis
YWETLMFFQSEELLHNSCVSEVISRFNGPSSPDAAALPVASKSIDLERNRRKKLNERLFALRALVPKISKMDKASIVKDAIDYIQDLREQEGRSEPRSQSSNL

SEQ ID NO: 733 - protein, 78 aa, Eucalyptus grandis
GVAIDVKIMGWDAVVRVESGRKDHPAARLMVALQELNLELQHASVSVVNELMIQQATVKMGSQLYTQEQLKAALLAVI

SEQ ID NO: 734 - protein, 122 aa, Eucalyptus grandis
GIYSCLNLDASNGGSSAIDPSISSAILDDFCTIKDGPFPNLSDCLVGNFSSSQDVQSQITSASLADSQAFSRQDFPDNSGGTSSSNVDFDESSILKNSTWQQQVAPPMRTYTKVQKAGSVGR

SEQ ID NO: 735 - protein, 133 aa, Eucalyptus grandis
MGSSASSQRPDNLQDKVGPVSVSDEEWKKRLTPEQYYVARQKGTERAFTGEYWNTKTPGTYHCVCCDTPLFESNTKFDSGTGWPSYYQPIGNNVKSKLDLSIIFMPRQEVLCAACDAHLGHIFDDGPPPTGKR

SEQ ID NO: 736 - protein, 163 aa, Eucalyptus grandis
MVDKCGEGLLVAVEAQKAVPAPFLTKTYQLVDDPSTDHIVSWGDDDSTFVVWRPPEFARDLLPNYFKHNNFSSFVRQLNTYGFRKIVPDRWEFANEFFRKGEKHLLCEIHRRKTAQPQLTHHHPHSASPLSGPTPAFFPFPSRLSISPSDSDDQHSSHWCDSP

SEQ ID NO: 737 - protein, 172 aa, Eucalyptus grandis
MALEALSSPTAPSAPFQFMKDSSPAAAAAAASSSSSAYDLPLAEPWAKRKRSKRPHNPPSEDEYLALCLIMLARGGAGRTLPPPPPPAVSSEAAKVAYRCPVCDKGFPSYQALGGHKASHRKHASSAAAAAGGDDQPTTSSTSAATTSSGVSGKVHECSICHKSFPTGQALG

SEQ ID NO: 738 - protein, 78 aa, Eucalyptus grandis
ISSSRWPRQETLTLLEIRSRLDPKFKEANQKGPLWDEVSRIMSEEHGYNRSGKKCREKFENLYKYYKTTKEGKAGRQD

SEQ ID NO: 739 - protein, 135 aa, Eucalyptus grandis
MGPQMNFRNLADVPAAERSTGGQPGIPLLSRQSSVYSLTFNEFQNTWSGLSKDIGSINMDEFLKNIWTAEESQLQLQDMAPSGNGGEGGGQVGNLLRQGSLTLSRTISQKTVDEVWRELFKETEDVKEGSREGGD

SEQ ID NO: 740 - protein, 49 aa, Eucalyptus grandis
DFERNRAEGVDSARFAELMISSGLLCNDAVIWVTFHSAYDFGYLVKILT

SEQ ID NO: 741 - protein, 101 aa, Eucalyptus grandis
MNFSDKEVQLASDHPKKPAGRKKFRETRHPVYRGVRLRDSGKWVCEVREPKKKSRIWLGTFPTVEMAARAHDVAALALRGQSACLNFADSAWRLPKPASTD

SEQ ID NO: 742 - protein, 113 aa, Eucalyptus grandis
GMDSRTSSRISGVTLQEVPPTSSQVPEIPPALGASANDPSSAVSELKAPSQGTAKVTTNQFPDMGMLAGAQESEAVSVNQADTVMTGISQTQDMVLEDIANISRDDYMGADLH

SEQ ID NO: 743 - protein, 200 aa, Eucalyptus grandis
KAYARRQHAWLTGANEVDSKTFSRAILAKSARIQTVVCIPLLDGVVEFGTTERVQEDISLVNHVKTFFVDHHPPHPPKPALSEHSTSNPAATSSGHHRFHSPPVPSYAPADPPAAANQGDEEEEDDDDDEEEGESDSEAETGRQGAAAAAQNPHGAGPANNAEPSEFEMSEDIRLGSPDDGSNNLDSDFPMLTINSTAAD

SEQ ID NO: 744 - protein, 327 aa, Eucalyptus grandis
DGSCREPKDGEESEATRILNLRLEDEGQQRMRKRVLDKLHTVFGGSDEDNYALGLDRVTDMEMFFLASMYFLFPSGEGGPGKCFASEKHVWLTDALKSSSDYCVRSFLAKSAGIRTIVLVPTDVGVVELGSVRSVPESSELVQTIRLSFSTNSFMSVKPIAALPMTNEKKDENAPFSNLALAGKGEAISKIFGKELTTVNSPGHYREKLAVRKMDSRQSWEPHHNGSKLPFSTPRNGTQDTSWAHHAHGVKQLSPVEFYGSQTSASKLEERMNSGRNDFGLNRYPTPKQVQMQIDFTGATSRPSVITRPFTADSEHSDVEASCKEEQ

SEQ ID NO: 745 - protein, 361 aa, Eucalyptus grandis
MMMMTMAAGGGDHHARSTPTVQIPPVWDPLDDPATGGCGGPYSPYSPYSPYSGGGNAGGAAGGGECCNDLTALRRFLPSNHHQDEEDEEDGRAPGEDGVLGCDEFRMYEFKVRKCARGRSHDWTECPYAHPGEKARRRDPRRFFYSGTACPDFRKGACKKGDTCEFAHGVFECWLHPERYRTQACKDGQSCRRRVCFFAHSPDQLRVLPAHQQQQQQQQQQQHSPKSATDSEFGSPVRPSAAAAAAFDSYFTKPWSASFISSPTSILTTSSPPISPPTNSPPMSPNQRGGCCGSPGSVSELVACMRNMQIAKMKMSPRGQMGGSLFGSPLRPGCHLAAPVTPRAESSPRYGQLGGGGGGGL

SEQ ID NO: 746 - protein, 78 aa, Eucalyptus grandis
LIRWRKHRRVRWAVGATRAAASRARSSGGVREQDRYLPIANISRIMKKALPANGKIAKDAKDTVQECVSEFISFITSE

SEQ ID NO: 747 - protein, 278 aa, Eucalyptus grandis
MATPDERPSSSSSAASAVAIRQVWAWNLDAEFGLIRDLIDRYPFVSMDTEFPGLVFRRPAGAGAGARPSPSDHYRLLKSNVDALSLIQVGLTLSDARGGLPGFIWEFNFREFDAARDPHAPDSIELLRRQGVDFDRNRAEGIDSARFAELVMSSGLVCNDAVSWVTFHSAYDFGYLVKALTRRELPGDLPEFLAVVRVFFGDRVYDVKHLMRFCHSLHGGLDRVAAALELDRAVGKCHQAGSDSLLTWQAFRKIRDVYFANDDGPEKHAGVLYGLEVY

SEQ ID NO: 748 - protein, 31 aa, Eucalyptus grandis
MATGVEGNEGVPANLRKQLAVAVRSIQWSYA

SEQ ID NO: 749 - protein, 229 aa, Eucalyptus grandis
MNHFFSSYSDPSSCSLDFAEASSSSSPLSDGRSAMVPGNFSDEEVLLASHQPKKRAGRKKFQETRHPVYRGVRRRSSGKWVCEVREPNKKSRIWLGTFPTAEMAARAHDVAALALRGRSACLNFADSAWRLPAPASADAKDIQQAAAQAAEAFRPAESEAEDVMSGYEKKSPSEEGMLYDDEDVFGMPGLLTNMAEGMLLPPPQCGGDGYGGEDDGNLDAYVSLWNYSM

SEQ ID NO: 750 - protein, 210 aa, Eucalyptus grandis
MPIRIQNLPKKNFDQGSSLSMPHVGVTYPPWWSLNEQQLPQSLPKNSGLKAESPPMLHHQAKHLGLQLQEQESSSTQSAGNSCHEVSVVGGANSQDQSISSESGQDESCGRSFEGQTKPIFMFNNPEIVFNSSLADQNQPLIRVPYPPVDPYYGGLLTAYRPQAIIQSQVGSQMFGMAPGRVPLPLNLADHGPIYVNAKQYSRNSSEEAV

SEQ ID NO: 751 - protein, 93 aa, Eucalyptus grandis
GYGFVRFGDETEQLRAMTEMNGMYCSSRPMRIGPAANKKPIATQQYQSASYQNSQGNQGENDPNNTTIFVGGLDPSVSDDLLRQVFSQYGELH

SEQ ID NO: 752 - protein, 97 aa, Eucalyptus grandis
GYRRSAKKCKEKFENVHKYYKRTKEGRAGRQDGKTYKFFSELEALHNTAAGATVGISSSFKWWWCCFWHCSPGRSLGTPSFDRDIVRQPRPNLHCPR

SEQ ID NO: 753 - protein, 241 aa, Eucalyptus grandis
MEMEDHHQYTAADLRHLINARPPPPPPHIQSISPPELFCGGGGHRNPTQHLESMMMGGGGLHNGQRQGHSHNHQHHHQFGRDHSSPSSVAMAGAAGGLESENGGNGRWPRQETLTLLEIRSRLDSRFKEANQKGPLWDEVSRIMSEEHGYQRSGKKCREKFENLYKYYKKTKEGKAGRQDGKHYRFFRQLEALYGENANSNSILQAPSLPHSLHFHPPPNINDINQDASHHRHPHQLQRPC

SEQ ID NO: 754 - protein, 104 aa, Eucalyptus grandis
MERGDPNVVAVARLRREDCERTKHDSAFATWKVLVGPTDWEDYSLGKEGAARYRVHNLPKSPGPGIYELGVAASHAKLGREIAKLDPRYIVVVYLGKADCVRTR

SEQ ID NO: 755 - protein, 229 aa, Eucalyptus grandis
MGYAQLVIGPAGSGKSTYCSSLYQHCEAIGRTIHIVNLDPAAENFDYPVAMDIRELISLDDVMEELGLGPNGGLMYCMEHLEENLDDWLTEELDNYLDDDYLVFDCPGQIELFSHVPVLRNFVEHLQRKNFNVCGVYLLDSQFITDVTKFISGCMASLSAMVQLELPHVNILSKMDLVKNKRDIDDYLNPEPRVLLSELNQTMAPKFEKLNKALAELVDEYSMVSFIPL

SEQ ID NO: 756 - protein, 81 aa, Eucalyptus grandis
YPTIIYRPYSFMAKISAVERGHFLTVIPHFAWRLVNPATLKYFDAPHRPMYMQEYLYSIRNHRYTATMLQHIAEDRDGTSH

SEQ ID NO: 757 - protein, 115 aa, Eucalyptus grandis
MPKGSSIKMGVPLQHSSGIKQLNVHFQERDLCSTQSTSQSFSEVPNIGGSTDCSQATVLEQTEHGETEGQSVRGQAKSALSMGTQDLVFQPLEVCIPLHYAEPSLGGFMPAAYGP

SEQ ID NO: 758 - protein, 356 aa, Eucalyptus grandis
MKERQRWRAEEDALLRAYVKQYGPREWHLVSQRMNTPLNRDAKSCLERWKNYLKPGIKKGSLSEEEQRLVIQLQAKHGNKWKKIAAEIPGRTAKRLGKWWEVFKEKQQREQKENKGALPIDEGKYDHILENFAEKLVKERSTPALLMATANGGFIHTDSPALAPTLLPPWLSNSNGTPTLRPPSPSVTLSLSPATVPASQPIPWLQADRGLDSGSLSLTGLPNHGPLPTSGENILMSELAECCKELEEGHRAWAAHKKEAAWRLKRLELQLESEKACRRREKMEEIEAKINTLREEQKASLDKIETEYREQLAGLRKDAESKEQKLAEQWTAKHVQLSKLIEQIGFRPRIADHDRQ

SEQ ID NO: 759 - protein, 93 aa, Eucalyptus grandis
GLDSCSVEELQQTENQLERSLTKIRARKNHLIREHIERLKAEERKLLEEKRKLLQEIECGKGLTPVSSEPPREEIRAESMDVETELFIGPPKR

SEQ ID NO: 760 - protein, 70 aa, Eucalyptus grandis
EDPVGRPESASEISQEPGQEFMDEDELLNMPKLLDDMAEGMLVSPPRTQMASENDSPEDSDGGESLWSYP

SEQ ID NO: 761 - protein, 243 aa, Eucalyptus grandis
MCGGAIISDFVEERLDRRRPGSCRPERKLTPHELWSELDPASDLLSLDGPVAQGHPNPFSLVANQLNQVMKSEEKNSEEAGHGHVSETQKSQSNGRSQRARKNVYRGIRQRPWGKWAAEIRDPHKGVRVWLGTFKTAEEAARAYDEAAKRIRGDKAKLNFSGPPAPAQPSAKKRCVAPDEPKDEAGAAGCELKERIASLESFLELEPTEEPLEPGTGPSPADLWMLEDLVTHHQHRFDNQLVY

SEQ ID NO: 762 - protein, 125 aa, Eucalyptus grandis
QQRLLQYWSDALNLSPRGRMMMMNRLGPDGRPIFRPPQPINTTKLYRGVRQRHWGKWVAEIRLPRNRTRLWLGTFDTAEDAALAYDREAFKLRGENARLNFPELFLNKDKAEESAGPSSSSSSPP

SEQ ID NO: 763 - protein, 141 aa, Eucalyptus grandis
SIPSVGLLVQYKLLNPASSYSSCIMIQDMSQGFRKIDTDRWEFANRGFQEGKKHLLKNIRRRRKLSDHRTTSSSTVASDYPEAGKEAELEMLKRDQEALKAEILKLREERENSQHEINQVIERFRYAECRCRRMFLFLSKA

SEQ ID NO: 764 - protein, 202 aa, Eucalyptus grandis
KHLLNNIYRRKPIHSHSGQGARLSDSEKQMYEEEIKRLRHEKSSLQLELQRYQGDNQDVDFQIQLLRKQFQNMEQKQTHLITVLAQLMQKPVFASLFTQQSDSPTKKRRLAELDHLHDSDDKSGLESLKFQKEKFNGVPFSLLDLDSVEKLEQSLHFLENLLQGVDNTSGAEQHDFGAISLPWPAGFTERKESLDDSDRHIH

SEQ ID NO: 765 - protein, 175 aa, Eucalyptus grandis
MQPKSKISNGVDAHPHSIQTSAVFTEPWWRGYNTISPADPGRNETHAPLGCINGGSESNGGQSQSNEERVEEDDDDDNVKGSGNPACSGAVGNQGQGPQNGHGAPTIITMRDDGLAQPPQLELVGHTIACASNPYQDPYYGGLMAQYGHQSMAYPFVGIPHARMPLPLDLAQEPC

SEQ ID NO: 766 - protein, 190 aa, Eucalyptus grandis
TGANEKDSVMEITFHVPNSNTQFVGDENRPPAQVFRDRIMSVADVGAGGEDAVVTFEGIAILTPRGRYSVELHLSFLRLQGQANDFKIQYSSVVRLFLLPKSNQPHTFVIITLDPPIRKGQTLYPHIVMQFETDYVVQSTLSMNDDLFNTKYKDKLEPSYKGLIHEVFTTILRGLSGAKVTKPGKFRSSQ

SEQ ID NO: 767 - protein, 251 aa, Eucalyptus grandis
LETSGNRLARAISDADTSSAAALMDMLEQMVSVMGDPIQRLGAYLLEGLRAKLKFSGSIIYRKLKCEEPTSSELLTNMQVLYQICPYWKFAYVSTNVIITKAMENEQRIHIVDFQITQGSQWVTFIQALAQRPGGPPLLRITGIDDSDSVHARGAGLEIVGQKLSEIAESCNVPFEFHDAAVSLSEVELQNLMIRPGDALAVNCPYILHHIPDESVSTQNHRDRVLRLIKSLSPRVVTLVEQESNTNTSSF

SEQ ID NO: 768 - protein, 174 aa, Eucalyptus grandis
GNWDEPTKEEVNEPADIAEAKTVSDSEEAKPNAKRKQPEKEASEKEASKKEPNKPPNSWFDLKVNTHVYVTGLPEDVTMEEVVEVFSKCGILKEDPETKKPRVKIYVDKETGRKKGDALVTYLKEPSVALAIQILDGAPFRPGGKVPMSVSQAKFEQKGDKFISKQVDGKKKRN

SEQ ID NO: 769 - protein, 218 aa, Eucalyptus grandis
TFEQLLLPFLYELQILIDLSNDKATVLTDKIQVLKDLTTEVNKLKAECAALIEESREEKNELREEKSSLKSEVENLNVQYQQRTRVMYPWAAMDPSVVMGPAYSYPGPIPVTPGPIPMLSQLQPFPFFGNQNASAIPAPCSTFIPNSMPANPTFEQQSTQYASTSHVSNKKDSKSRSSDHQRGSIAEQDEDSNNVATDLELKMPGTSSHQDLTSGEKK

SEQ ID NO: 770 - protein, 188 aa, Eucalyptus grandis
HPMKPESVEVLNFGDSGSGRLLSSHSQVAVAEEPLNHVEAERQRREKLNQRFYALRAVVPNVSKMDKASLLQDAESYIRELNMNLQAAESDKEDLKKQLDELKKRSSDKECIPVDQDRKMAKPTGSRSTGVAIDVKIMGWDAVVRVESGRKDHPAARLMVALQELNLELQHASVSVVNELMIQQATVK

SEQ ID NO: 771 - protein, 157 aa, Eucalyptus grandis
MMLGEPHRPPNPTIDVPPWPILDDPTDDAVPHSPYSPYTLNAGYGGGCDSSPSAAGPGHFQDVMAALRRFLPSNRPDTDPDPDMTSSREADFPMDVYSCDNFRMYEFKVRRCARGRSHDWTECPYAHPGEKARRRDPRKYHYSGTACPEFRKGSCRK

SEQ ID NO: 772 - protein, 129 aa, Eucalyptus grandis
DEPSTSATNSGGGAAAASSSGGGRSHECSICHKSFPTGQALGGHKRCHYDGGASGSANSGVTTSEGVGSAAPPALGYDSGRRNFDLNVPALPEFPTGFIVSGDDEVESPHPSKKPRFSTPLKIKLSPEQ

SEQ ID NO: 773 - protein, 149 aa, Eucalyptus grandis
MAFEQYFAQEWRPIPGPAMDSGSSDGCFDCNICLDFAIEPVVTLCGHLYCWPCIYKWLHVQSASLASDEHPQCPVCKAEISHTAMVPLYGRGQSSKESDLQDKALQLGTIVPPRPAACGIQALASTTPRSGQQLPYRNPYQNPYYSANS

SEQ ID NO: 774 - protein, 175 aa, Eucalyptus grandis
MVKRDREDTEVEALARANCLMLLSRVGESTDSASPDRKSRPTERMFACKTCNREFSSFQALGGHKASHKKPKLISGDLFHLGHAADSSPAKPKTHECSICGLDFPMGQALGGHMRRHRAAMLESLAAAAAKPVPVLKKSNSKRVTGLDLNSLPMEDDLTLRLGKVAPPLVLDLVL

SEQ ID NO: 775 - protein, 154 aa, Eucalyptus grandis
PDAAGERLGHGDQEEPLGVGGVGLPGRAYFSSNPAWVTGAERLGNCGCDRARQAQIFGLQTIACVPVLNGVVELGSTEPIYQSSDLISGIRGLFNFHESEMGCGGRVLNSEHDPASLWICDPPVTMEINDRPMTFQIENPSSSSLTESPSAICA

SEQ ID NO: 776 - protein, 177 aa, Eucalyptus grandis
LGTQIPSGIHMPSANLSSISILGPIPMVSGDGGGRTGSERSRNADCAPAGFPGGDEDVNKGGDIPYGMSTIVRVIPNSRYLRVAQQLLDEIVNVRKALKRPDDANDQSRHENQRSPKDADGGSKNEASSNPQESASNSSELSAAEKQDLQNKLTKLLSMLDEVDKRYKQYYHQMQIV

SEQ ID NO: 777 - protein, 59 aa, Eucalyptus grandis
GNEVSSDYGWKFLFAGLQRCGKSCRLRWLNYLRPDIKRGNISPDEEELIIRLHKLLGNR

SEQ ID NO: 778 - protein, 175 aa, Eucalyptus grandis
MHHPPNPDSLSLLQSARTPNAPPEHPVPSTSRRDEVAVLKSQKAGREKLRRDRLNEHFIELGNTLDPDRPKNDKATILSDTVQLLKDLTAQVNQLKAEYSTFCEESRELTQEKNDLKEEKASLKSDIESLNAQYQQRARAMFPWPIMDHSVVMAPPSYPYPVPVAVPSGPIPVHP

SEQ ID NO: 779 - protein, 162 aa, Eucalyptus grandis
MNVEKLMKMAGSVRTGGKGTMRRKKKAVHKTTTTDDKRLQSTLKRIGVNAIPAIEEVNIFKDDVVIQFVNPKVQASIAANTWVVSGAPQTKKLQDILPGIINQLGPDNLDNLRKLAEQFQKQSPGAAATAGATAMQEDDDDEVPELVPGETFEAAAEEGHKS

SEQ ID NO: 780 - protein, 151 aa, Eucalyptus grandis
MGEPIFLPGRTSLVGSISVNVVGIQHNAGTFRAGETVALVREPSNTDDEMAIQVLNTRGMVVGYIKREAAKVLAPLIDSQLISVYAIVPKVPRVEKLFFINCQVRVLARDDDFEHVKSTILEGKLMLTPPVGKEVRGVNESFTLVGQGVEK

SEQ ID NO: 781 - protein, 611 aa, Eucalyptus grandis
MMMFEDMGICGDLDFFSAPLGEGHGVAPQTEPEATVEDDYSDEEIDVDELERRMWRDKMRLKRLKEQNKGKEGVDIAKQRQSQEQARRKKMSRAQDGILKYMLKMMEVCKAQGFVYGIIPEKGKPVTGASDNLREWWKDKVRFDRNGPAAIAKYQADHSVPGKNDGCNPIGPTPHTLQELQDTTLGSLLSALMQHCDPPQRRFPLEKGVPPPWWPTGNEDWWPQLGLPKDQGAPPYKKPHDLKKAWKVGVLTAVIKHMSPDIAKIRKLVRQSKCLQDKMTAKESATWLAIINQEESLARELYPDSCLPLSSSGGSGSLVINDCSEYDVEGMEDEPNYDVQERKPENLNPPSHLGLERMRGPFVQQSPFQMKGEVVSNLDMARKRKPCNDLNMVMDHKIFTCEFLQCPYSELRLGFRDRTSRDNHQLSCPYRSNSSEFGGSNFHVNEVKPVIFPQGFVQSKPMTSTVNSASTPFDLSGLGVPEDGQKVISDLMSIYDTSIQGNKNMNPANDAIIEDQSRPQPKLQQQNEFVGSFFQQPNASANHHMFSREDIQFDRFKTMNSSFEANNHNHDNLQLMFGSPFDLSSFDFKEELPGGVMDPLPKQDVTIWFQQ

SEQ ID NO: 782 - protein, 133 aa, Eucalyptus grandis
MVKRDREDTEVEALALANCLMLLSRVGKSTDSPWLNHKSRPTERMFACKTCNREFSSFQALGGHRASHKKPKLSGDLFHLGRSADSSPAKPKTHECAICGLEFPLGQALGGHMRRHRAAMAESLATAEKPVPV

SEQ ID NO: 783 - protein, 145 aa, Eucalyptus grandis
MVMDISNDDRYLNEEIGGPKDALDDGTQPNNKRKRGRAPKRAMKAEREKLKRDHLNELFDKLGSLLELSEPNNGKASIINETIRLLKDMISQIQSLRKENTTLLSESHYVAAETNELKDENFALEAQIKNVQRELEDKLGHSKPD

SEQ ID NO: 784 - protein, 322 aa, Eucalyptus grandis
ECLPLLDMTQQPPWQELVATDLHGNEWHFRHIFRGQPRRHLLTTGWSVFVSSKKLIAGDAFIFLRGEDGELRVGVRRLMRQQSNMPSSVISSHSMHLGVLATASHAIATGTLFSVFYKPRTSRSEFIVSLNKYLEARAHKLSIGMRFKMKFEGEEVSERRFSGTIIGVGDSMSSGWTNSEWRSLKVQWDEPSSIMRPDRVSSWELEPLVVTAPSNSQQVQRKRARPTVLPSSSVQELSAFGGPKAPEYSSDFLHGDSQRGRDVYLSPKFSPSARSKSLNYNGNGSPAALSGYTVNWPSHMETITDPCTPVNGKESSEKRESG

SEQ ID NO: 785 - protein, 50 aa, Eucalyptus grandis
MASQFNFKGITDASQAEGVAGKSHGNHSLTRQPSIYALTFDEFQNTWGGL

SEQ ID NO: 786 - protein, 152 aa, Eucalyptus grandis
ETSPSSSSLTTTTAPAPAAAAAAATTSSSSYSSAVAVAATTATTSSSSTSSTGSDPALEPSKRSEDCTSQKGPGKSPSPGAHPEEPAGKRHKAGGSGEHPTYRGVRMRNWGKWVSEIREPRKKSRIWLGTYPTAEMAARAHDVAALAIKGSF

SEQ ID NO: 787 - protein, 148 aa, Eucalyptus grandis
MFPRPKVDPASAGTVVIREVWAHNLESEFDLIRDVVDTHPFISMDTEFPGVVFRPPPPPSAGGHYRRLRPSDHYRLLKSNVDALSLIQVGLTFSDPDGNLPDLGCPGGPRYIWEFNFRDFDVARDAHAPDSIELLRRQGIDFERNRAE

SEQ ID NO: 788 - protein, 248 aa, Eucalyptus grandis
KPSERRGGPRGPFRGSGGRRGGFNNGEAGEGERPRRTFERRSGTGRGNEFKRDGAGRGNWGTPTDEIAPEPEEPVVEVEKNVGSEKQLVDEEAADASKENPLNEPEEKEPEDKEMTLEEYEKVREEKRKALLALKAEERKVEVDKELKSMQQLSSKKENHDIFIKLGSEKDKRKEAAEKEERAEKSVSINEFLKPAEGERYYNPGGRGRGRGRGARGGYGGGGGGGYGRDAAAPSIKDPGQFPSLGGK

SEQ ID NO: 789 - protein, 55 aa, Eucalyptus grandis
MSFTGTQVKCKACEKTVYPVEQLSADGVAYHKSCFKCSHCKGTLKVCQFFQLVYN

SEQ ID NO: 790 - protein, 148 aa, Eucalyptus grandis
MIDLNTVEDDETPSSGSSPASSLSSAISASNINSNPAYPTSSSSSSSSCSPLCLELWHACAGPLISLPKRGSLVVYFPQGHLEHVSDFPTSVFDLPSQIFCRVVDVKLHADASTDDVYAQVSLVPEREQIEHKLREGDNEIDLDEDEI

SEQ ID NO: 791 - protein, 106 aa, Eucalyptus grandis
MASHPSNHSCGRPHQGAFADALYKELWHACAGPLVTLPREGERVYYFPQGHMEQLEASTNRGLEQQMPSFDLPSKILCRVVNIQLRAEPETDEVYSQITLLPEPEQ

SEQ ID NO: 792 - protein, 82 aa, Eucalyptus grandis
EQYLNLAYVQQLENSRFRLMQLEQELQRARQQGIFVSSGNPGDLSHNMAAIGNGAMAFDTDYARWLDEHQRLINDLRSGVNF

SEQ ID NO: 793 - protein, 247 aa, Eucalyptus grandis
FFLYIISLFLVRENSERSREGTSSNGDGKSEVQGKVAGEVDAASENVSGGAIERPRATGKLAAPVNSPSMSSSLDLKNSCMDANANPVSILQPGVVPPEAWLQNERELKRERRKQSNRESARRSRLRKQAETEELAKKVDSLSAENRALKSEISQLTENSDKLRLENATLMERLENAQGVEKAVESLGKFNDNGLLSDKTENLLSRVNNSGAVDRRSEDEGEIYERKSNSGAKLHQLLDSKPRTDAV

SEQ ID NO: 794 - protein, 145 aa, Eucalyptus grandis
FSLSPHHLKMEVAPQAEHHQNHHHHHHQYHHQPQQGEPGSYFLSAPPPPPHYSSSGLCYGGGVGDNNNGGYLHSPLSVMPLKSDGSLCIMEALTRSRPQGLGQGSTPKLEDFLGGASATVTATTMPLSLDSLYSYQQSADPEKQS

SEQ ID NO: 795 - protein, 220 aa, Eucalyptus grandis
ETQREKVERERETSIPSQSPQPTILPPTASSPGRSDPPGDATTMVKPSGGGGDRAPPLAPFLSKCYEMVEDEATDPIIAWGSAGDTFVIWDITQFTLQLLPHYFKHSNFSSFMRQLNIYGFRKVDSDRWEFANDGFIRGQKHMLKNIRRRKNVQVVDQKKSLQKQDNSVEEVDKIKIDGLWKEVENLKIDKTVLSLELGKVRQLQETSDNKLVLLRDRVQ

SEQ ID NO: 796 - protein, 212 aa, Eucalyptus grandis
MIGAATNQIPPPPPPPQPQQAAPAAAAIRFPDSVYNALRVGAVFQRLSKHLATIGKGSGLSASCGTSMEFLNSCLCLARGIDYAVANNEVLPKAHELPVLLKRLCLLKDDSFYLSVIMVLMISVKNACKYKWFSEKDCQELLALVDEIGKNFQSPRDAAVGSTASFSRVSSIFARFYPQLKMGYDLISLEVEPGYAALVNDFHISKSMVHSP

SEQ ID NO: 797 - protein, 269 aa, Eucalyptus grandis
MNSTTTQFVSSRRMGMYDPIHQIGMWDENFKQNGNPNAPPALIIPMHANLDNQSEDTSHGSQDTAGKYEQETSKPYDKVQRRLAQNREAARKSRLRKKAYVQQLEASRLKLMQLEQEVDRARQQGVYMASGVDSAYPGYGGCLNSGIVAFEMEYGHWIDEQNRQICELRAALNDHRTDVELRILVESGMNHYLELFRMKAVASKADVFYVMSGMWRTSSERFFLWIGGFRPSELLKVLMPQLDPLSDQQWAFVSNLRQACQQAEDALKQ

SEQ ID NO: 798 - protein, 145 aa, Eucalyptus grandis
INTTPQFLSLRSHPNRHPQSLSFSLFFSVCPVCDKGFPSYQALGGHKASHRKHASSAAAAAGGDDQPTTSSTSAATTSSGVSGKVHECSICHKSFPTGQALGGHKRCHYEAPAPIPASFSAPSAAAAPAASGVSVSEGVGSTHTQ

SEQ ID NO: 799 - protein, 121 aa, Eucalyptus grandis
RHHKIQQLQRARSELARMFSLEGQLEDPVRSGWQLVFVDRENDSLLLGDGPWPEFVNSVWCIKILSPQEVQQMGKQDLELLNSIPVQRHSNGGCDEFTNRQDSRTINSGIPSVGSLDYGTL

SEQ ID NO: 800 - protein, 182 aa, Eucalyptus grandis
TDDTGDKNHRFEGGQLGVAAASDSSDRSKEKATDQKTLRRLAQNREAARKSRLRKKAYVQQLESSRLKLTQLEQELQRARQQGIFISGSGEQSHSMSGNGALAFDVEYARWLEEHNKVVNELRNAVNAHAGDTELRTIVDNVAAHFDEIFKLKGTAAKADVFHILSGMWKTPAERCFMWIGG

SEQ ID NO: 801 - protein, 74 aa, Eucalyptus grandis
MSFTGTQVKCKACEKTVYPVEQLSADGVAYHKSCFKCSHCKGTLKLSSYSSMEGVLYCKPHFEQLFKETGNFNK

SEQ ID NO: 802 - protein, 194 aa, Eucalyptus grandis
KSVFHVFYSPRASHAEFVVPYQKYLKSINNVICIGTRFKMRVDVDDAPEKRCTGVVTRIGDLDPYRWPNSKWRCLMVQWDDDITNGHQDRVSPWEIDPSVSHSPLSIQSSPRLKRPRTSLPTMPPVPGGGVRLLDFEESLRSSKVLQGQEKLHLVSPVYGRDTLNCQVDFEQSPAHQGLASVVSKKRPTISMST

SEQ ID NO: 803 - protein, 282 aa, Eucalyptus grandis
RRANRPQTVMPSSVLSSDSMHIGLLAAAAHAAATNSRFTIFYNPRASPSEFVIPLAKYVKAVYHTRVSVGMRFRMLFETEESSVRRYMGTITGISDLDPVRWQNSHWRSVKVGWDESTAGERQPRVSLWEIEPLTTFPMYPSPFPLRLKRPWPSGLPSFHALRDGDMSISSSLMWLQGVGDQGVQSLNFQGFGMTPWLQPRYDTSMAALQTDVYQAMASAALQDMRAVDPSKCASQSLLPLQQSQNVPMGQASIIQRQMLQQSQSQNSLLQGFQENQAKPKG

SEQ ID NO: 804 - protein, 177 aa, Eucalyptus grandis
DKLREIENSLFGPESDISDSCNCCLNSGSHQFPSTGQWNVNQMIEMIPKLDLKDMLIVCAQAVAEADMPRTAALMEVLERMVSVSGDPIQRLGAYLLEGLRARLESSGSIIYRKLKCKEPTGSELMSYMSILYQICPYWKFAYESANVVIGEAIKYESRIHIIDFQIAQGSQWIPII

SEQ ID NO: 805 - protein, 86 aa, Eucalyptus grandis
MGRSPRCDKDGLNKGAWTAAEDQILMDYVKLHGEGKWSRLSRETGLRRCGKSCRLRWMNYLRPDIKRGNISPDEEELIIRLHKLLG

SEQ ID NO: 806 - protein, 133 aa, Eucalyptus grandis
MRLSSSGFNHQSPEASNAGEKKCLNSELWHACAGPLVSLPPVGSRVVYFPQGHSEQVAASTNKEVDAHIPNYPNLSPQLICQLHNVTMHADVETDEVYAQMTLQPLSPQEQKDLYLLPAELGTPSKQPTNYFC

SEQ ID NO: 807 - protein, 222 aa, Eucalyptus grandis
SPFLSLTTSSSSSPPRRKIRTLGRAANRRNPSPAEVAAAAVHAYLSRRRPAERILLRSGPMSPARSKPIAIRAVFYANLESEFALIRSVVDRFPIISMDTEFPGTVIRPGPAGGGGGRALPPPESNYGLLKANVDRMHMIQIGLTLSDGEGNLPDFGTKCAYIWEFNFRDFDAARDVQNPDSVALLRKQGIDFEMNRQKGADSARFGELLMSSGLVCNDEVS

SEQ ID NO: 808 - protein, 111 aa, Eucalyptus grandis
RGGFNMEKLARGSVQEEHLNAAVALDEGWYCTPRMLHFSFENEFKRDGAGRGNWGTPTDEIAPEPEEPVVEVEKNVGSEKQLVDEEAADASKENPLNEPEEKEPEDKEMTL

SEQ ID NO: 809 - protein, 159 aa, Eucalyptus grandis
QSGLPLDDRPEGARSPSPEPIYDNMGIRINTREYRARERLNKERQDIITQIIKRNPAFKPPADYRPPKLQKKLYIPMKEYPGYNFIGLIIGPRGNTQKRMERETGAKIVIRGKGSVKEGRLQQKRDLKPDPAENEDLHVLVEAETQEALDAAAGMVEKL

SEQ ID NO: 810 - protein, 387 aa, Eucalyptus grandis
MCGGAIISDFIPNQRARRLTSDFLWPDLKRSAGKQSRRPARSEVVDVVDDDFEADFQGFKDESDVEDDFDDEVEVDVKPFAFSAAEPRYSKGSSTTKSVEYNGQAEKSAKRKRKNQYRGIRQRPWGKWAAEIRDPRKGVRVWLGTFNTAEEAARAYDAEARRIRGKKAKVNFPDDSSSASSKRSVKSNVQKLPKTTTNNVQPNLNQNFNYANSSDDDIYSSMGFVEEKPPTNQFYMDALNAQGVSGMNSLSPADNAPLYFNSDQGSNSFECSDFGWGENAPRTPDVSSVLSATLEVDESQFEDANPRKKIRSASDDVSEEENTAAKTFSEELSAFESDMKFFQMPFVDGGWDPSVEALLGGEATQDGGNAVDLWSFDDLAPMMGGVF

SEQ ID NO: 811 - protein, 219 aa, Eucalyptus grandis
HGGAAGFLGPRAVPMKQAGLAQKPTKLYRGVRQRHWGKWVAEIRLPKNRTRLWLGTFDTAEEAALAYDKAAYRLRGDFARLNFPHLKHKGSHIQGDFGDYKPLHSSVDAKLQAICQDMAEKPADGKKRRSAPAGGGSSAAAASPRRPEPEPEPVKTEVGVSAATSSSPESDDASVEESSPLSELTFNDFVEPQWESVGVPENFSLQKYPSEIDWAAIYS

SEQ ID NO: 812 - protein, 75 aa, Eucalyptus grandis
MKERQRWRAEEDALLRAYVKQYGPREWHLVSQRMNTPLNRDAKSCLERWKNYLKPGIKKGSLSEEEQRLVFHLLP

SEQ ID NO: 813 - protein, 235 aa, Eucalyptus grandis
VVLPSSGMVKSSGGAGDSDHSDLEASVVKEADSSRVVEPEKRPRKRGRKPANGREEPLNHVEAERQRREKLNQRFYALRAVVPNVSKMDKASLLGDAIAYIKELNSKLQTTESDKENLQKQMESLKKELTNKDSRSALPQSDKDLSISSNHGAKLIELDVDVKIIGWDVMIRIQSSKKNHPAAKLMQALMELDLDVHHASVSVVNDLMIQQATVKMSGRFYSQEQLRLALSSKIG

SEQ ID NO: 814 - protein, 111 aa, Eucalyptus grandis
ELKPDKIGLQRSEQLRDLYESLLEGETDAQNKRPSAALSPEDLTDEEWYYLVCMSFVFNPGEGLPGRALADGQTIWLCNAQYADSKVFSRSLLAKSASIQTVVCFPYLGGV

SEQ ID NO: 815 - protein, 107 aa, Eucalyptus grandis
MESERYDETTEKQRIRRRPHQKPYRGIRMRKWGKWVAEIREPNKRSRIWLGSYATAVAAARAYDTAVFYLRGPSARLNFPDLILHEGQDSLGEVSAASIRRRAAEVG

SEQ ID NO: 816 - protein, 89 aa, Eucalyptus grandis
MAFTGTVDKCKVCDKTVHVVDMMTLEGIPYHKTCFRCSHCNGTLVMSNYSSMDGVLYCKTHFEQLFKESGDFRKNFHSAKSDKPNEMTR

SEQ ID NO: 817 - protein, 96 aa, Eucalyptus grandis
MESERYDETTEGQRIKRRPHQQQQQQQQRRQKPYRGIRMRKWGKWVAEIREPNKRSRIWLGSYATPVAAARAYDTAVFYLRGPSARLNFPDLIWRE

SEQ ID NO: 818 - protein, 159 aa, Eucalyptus grandis
MVKRDREDAEVEALAVANCLMLLPRVGESAVSNRESRSTERMFACKTCNREFSSFQALGGHRTSHKKQKLIPGGLFHLGCTADSSPAKPKRHECSICGLEFPMGQALGGHMRRHRAAMAEGLAAEAAKPVPVLKRSNSKRVMCLDLNSSLMEDDLTLRL

SEQ ID NO: 819 - protein, 241 aa, Eucalyptus grandis
EDSLDKEPPPPPPPRFKVHSFCKTLTASDTSTHGGFSVLRRHADECLPQLDMSKQPPTQELAAKDLHGNEWRFRHIFRGQPRRHLLQSGWSVFVSSKRLVAGDAFIFLRGENGELRVGVRRAMKQQGNVSPSVISSHSMHLGVLATAWHAISTGTMFTVYYKPRISPAEFIIPYDQYMESLKKNYSIGMRFKMRFEGEEAPEQRFTGTIIGIEDADPKGWRDTKWRSLKVRWDENSAIPRP

SEQ ID NO: 820 - protein, 185 aa, Eucalyptus grandis
FRGVRKRKWGRWVSEIRLPNSRERIWLGSYDTPEKAARAFDAAAFCLGRPAAKLNFPGSPPEISGAASLSPDEIQSAAASHANFGAVAVPARAELPRPGSPAPSPSLSASEASSVLTTESDLTLDLSFLDFLDDSGPVSGEPHIGKFPGVEEAPDVFYHMQFPSVESAGLNLDTLLASDSFPWRI

SEQ ID NO: 821 - protein, 187 aa, Eucalyptus grandis
EADFLAKHSKPEIVDMLRKHTYRDELEQSKRSYRGSAAERAGRGGFGPGRTEWSAAAREQLFEKAVTPSDVGKLNRLVIPKQHAEKHFPLPGGPAATMKGVLLNFEDVGGKVWRFRYSYWNSSQSYVLTKGWSRFVKEKSLKAGDTVCFQRSTGPDKQLYIDFKPRGQPPAGPAAPPPPPVQMVRLF

SEQ ID NO: 822 - protein, 110 aa, Eucalyptus grandis
VNPPTRTFVKVHKSGTFGRSLDISKFSSYDELRSELARMFGLEGQLEDPQRSGWQLVFVDRENDILLLGDDPWQEFVNNVWYIKILSPHEVKQLGKQGINPANSVPRQAL

SEQ ID NO: 823 - protein, 370 aa, Eucalyptus grandis
MTRRCSHCCNKGHNSRTCPVRGGGGDGGGAAAAPSSSSPSTSSSGAAAAAAASASGGGVKLFGVRLTDGSIMKKSASVGCLSAAHYHSSSSAAASPNPGSSPIDGSDGYLSDDPAPGSRSSNRRVERKKGNPWTEEEHRRFLIGLQKLGKGDWRGIARDFVTTRTPTQVASHAQKYYIRQSNAGRRKRRSSLFDMAPDMATADQPSHPEETFLPPLVRLNDDTNSTTSTSMGLDLERTPMETSHPETSEGGGDVAMESIDQVPLVPCYFPYYLPLPFPMWPPNMAPPEDGRVVETSHHRVLKPIPVIPKEPLNIDQIVGMSQLSLAENEPAPLSLKFLGETSRQSAFIKAPSSVNESDLDNCKDGATQAA

SEQ ID NO: 824 - protein, 160 aa, Eucalyptus grandis
ELWLSFGTGEKKSINSELWHACAGPLVSLPPVGSLVVYFPQGHSEQVAASMQKETTCVPSYPNLPAKLICMLHNVTLHADLETDEVYAQMTLQPVSKYDQEALLASDMGLKQSRQPTEFFCKTLTASDTSTHGGFSVPRRAAEKIFPSLDFTMQPPCQEL

SEQ ID NO: 825 - protein, 129 aa, Eucalyptus grandis
MALEALNSPTAAAPFGHDDADGHPWAKRKRSKRPRADPQDQPSEEEYLALCLIMLARRRRRPGSSGRLHECSICHKAFPTGQALGGHKRCHYDGGSSSSAARAASSSEAGGPSHTTVSHREPIDLNLPA

SEQ ID NO: 826 - protein, 115 aa, Eucalyptus grandis
RHLLQSGWSLFVSSKKLVAGDAFIYLRGENGELRVGVRRAMRQLNNVPSSIMPSHSMHIGVLATAWHAISTGTMFTVYYKPRTSPAEFIIPFDKHIESAKFDYSIGMRFRMTFEW

SEQ ID NO: 827 - protein, 199 aa, Eucalyptus grandis
SSVHDISENGEADEQQKHSEQHESSPATGVPHPGVSLPNVQYATPPQLGAGHAMTPPAYPYPDPYYRSIFAPYDAQSYPQQPYGAQPMVHLQLMGIQQAGVPLPSDAVEEPVFVNAKQYHGILRRRQSRAKAELENKALKSRKPYLHESRHLHALRRARGCGGRFLNAKKDENQQSEVSSADKSQGNINLNSDKSDRSS

SEQ ID NO: 828 - protein, 98 aa, Eucalyptus grandis
VKDMFQDQREKYDTFLEVMKDFKAQRTDTTGVIARVKELFKGHNKLILGFNTFLPKGFEISPDEDETPIKKNVEFEEAISFVNKIKKRFQNDEHVYKS

SEQ ID NO: 829 - protein, 136 aa, Eucalyptus grandis
MFRQHNLLLNFNPTDDDPQDEGSPPPPYVLRGAPPPAEPSPAEKEPMFEKPLTPSDVGKLNRLVIPKQHAEKHFPLVGEATQQLSFEDESGKWWRFRYSYWSSSQSYVLTKGWSRFVKDKRLDAGDVVLFTATAPT

SEQ ID NO: 830 - protein, 96 aa, Eucalyptus grandis
MAQRSAPAPFLTKTYQLVDDPATDDVISWGESGRTFVVWKTAEFAKDLLPSSFKHNNFSSFVRQLNTYGFRKIVPDKWEFANDRFQRGQKELLSEI

SEQ ID NO: 831 - protein, 81 aa, Eucalyptus grandis
RMWRDKMRLKRLKEQNKGKEGVDIAKQRQSQEQARRKKMSRAQDGILKYMLKMMVAHWKRGLVAPAGFAEGSRSPALQETS

SEQ ID NO: 832 - protein, 94 aa, Eucalyptus grandis
MDQWRTDLGASTSVHPQQHQHQHQHHPSSRLHASHDEPRQREEADVRDPVAARKVQKADREKLRRDRLNEHFLELGSTLDPDRPKNDKATILTD

SEQ ID NO: 833 - protein, 245 aa, Eucalyptus grandis
KKTISSEHKRRRVVVVVLLLLVPSTSFFPPPSSSLPPSLSLNLPNPSRRRRRERERERERREDHRFRPSRARAVMRRGRCAAAAAKREAAEIAPPPVPHAAAAAAAEPRYRGVRRKSLGRYTAEIRDPGTKKLVRLGTFGSPEEAARAFDAKAVAFRGVKARTNFPVAPSSFPPAASRDLRAPLIESRKFGRRGARDLRGDHHDVSPQRPTSSSLSSTVVSSSGPRPSPSPETAKRRTRTPPRHR

SEQ ID NO: 834 - protein, 180 aa, Eucalyptus grandis
YNSNSDPIREEFMKALEPFMKSVSPVSSPLSSLSSCDSVFPKQQPNLNPDLCSSWIVNPMGLEQSGSIGLNRLSHSQIQHIQDEMLLRRQNQELWLASAVKSPLQHEKFDQCRYQNHHGSPHLLRPKALSMKRVGVPPKPNKLYRGVRQRHWGKWVAEIRLPKNRTRLWLGTFDTAEEAA

SEQ ID NO: 835 - protein, 234 aa, Eucalyptus grandis
RERERGRGVMDLFFHEEVQSDIFWCDQLVEPPPPPPPPLPPANPSAFSPYTNRLPSQDRGFMPNPGNNMNKRVMEFLRRSWAEPSQIQEFDRERGFRHMLSERMRREKQKRSYSALLSELPHGTKNDKNSIVQTACMRIKELVKYKQELERQNGELKSGLNEKSGGDKAEGTKIRVKIANPTSGIDSMLEVLKCLDNMGLKATAIQTQCSADQLFAVIEVENEVCAQQSDANVH

SEQ ID NO: 836 - protein, 59 aa, Eucalyptus grandis
HGATWRRKEANGGSEASDAVLPRAHHRHRYKGVRMRKWGKWVAEIRQPNSRDRIWLGSY

SEQ ID NO: 837 - protein, 38 aa, Eucalyptus grandis
ELLQIQRKRKRMESNRESAKRSRLRKQQHLDELTTEVG

SEQ ID NO: 838 - protein, 167 aa, Eucalyptus grandis
MAPREKPSVAAIPNPNGAKEIRFRGVRKRPWGRYAAEIRDPGKKTRVWLGTFDTAEEAARAYDTAAREFRGAKAKTNFPTSAELISSSRSPSQSSSLDEPSPPPPAGAVQAAALGPPLDLSLGRHPVAAAAAGPGPYFPGAAAMCFPVMPPPPRPVFFFDPFGRMEH

SEQ ID NO: 839 - protein, 84 aa, Eucalyptus grandis
CLGLSSVAANAEKLAALQNEYHFAKARIDEDHEKAQRLEKKVKTLTFGYQMREKTLRDQIESTFKQLDTAGTELECFPALQKQE

SEQ ID NO: 840 - protein, 157 aa, Eucalyptus grandis
PSSPVSTKTHPPYLCTRPTRLSQGLRYRRLAAKHEEKPSAVLDKSQDPTDSAKPSKKPRHRHSPTQLAALNELFEKSEHPTLEERGQLAEKLGMETKTVNAWFQNKRASTKKRNKGGTSEPHPATSQNDLSEDALKTPSALPSIANLLNDAPSSASP

SEQ ID NO: 841 - protein, 86 aa, Eucalyptus grandis
YLHNPMRKRQRTLDMHAGAPGPNDAIDANSVGDNAFIADHDAIDSAGDDDDDEDKPKTGQKQGRRKIKIEFIQDKSRRHITFSKRK

SEQ ID NO: 842 - protein, 201 aa, Eucalyptus grandis
DHVPSSSALDSRSSSNRTSGVTLAEVLPTPGQSKSSADSGFCVSHLGGVPDSQSSSYAAEHVNTHQTQEIHLPVPQDNADLPDANFLVSETASPDYLETLSAALDGTMDVESDAFSSERDAGIMLDDVTNLPAISDVFWEQFLAASPLTADTEEISSTSHETGITNDQESHTKVENGFEKAHYMDHLTKQMGHLTSNNGTG

SEQ ID NO: 843 - protein, 187 aa, Eucalyptus grandis
FSTPPPHPESNPIPSLPPSLFFPQSFVAFSSTHAPQSPTPSIKLKHHHLKKKEGKKERRTGDPTEGRARTRHGTIPLLREGAHQQGRVDQGRGPAPHRLHPPPRRRLLALPPQICRASQVRQELQAQVDKLPPPRPQRGNFTEEEDELIIKLHSLLGNKWSLIAGRLPGRTDNEIKNYWNTHIKRKA

SEQ ID NO: 844 - protein, 112 aa, Eucalyptus grandis
MEMKGGVVPKEEEASSDVGQPPPPPPPPPQPMEGLGEAEAAPFLTKTFEIVEDPATDPIVSWSEGRNSFIVWDAHQFAVTLLPKHFKHGNFSSFIRQLNTYGVFDEYDTASF

SEQ ID NO: 845 - protein, 76 aa, Eucalyptus grandis
MTGNFGWGSNSMEEAWRKGPWTAEEDKLLIEYVKLHGEGRWNSVARLTGLKRNGKSCRLRWVNYLRPDLKRGQITP

SEQ ID NO: 846 - protein, 142 aa, Eucalyptus grandis
MNSNASSNPQSMATSTTSATTPAAGGDGGKKVRKPYTITKSRESWTEEEHDKFLEALQLFDRDWKKIEDFVGSKTVIQIRSHAQKYFLKVQKNGAVAHVPPPRPKRKAAHPYPQKASKNVLVPLQASMAQPSSTNPAFTITP

SEQ ID NO: 847 - protein, 84 aa, Eucalyptus grandis
MKMAERSNSSDPETSPSNSPSTSSSSSSYSPDPRRRAGSPAAARDPLRSSKRSKHPVYRGVRMRNWGKWVSEIREPRKKSRIWL

SEQ ID NO: 848 - protein, 60 aa, Eucalyptus grandis
KWRSRFRMAGFQQFPLSSAVTDAVRNLLREYNENYRIEEKDGALYLWWRNRAMATSSAWW

SEQ ID NO: 849 - protein, 90 aa, Eucalyptus grandis
GVGFPDPGPDNGQVLDARDPLAEKKLELATCQRRVEEEMLKHSKAVEVTRTSTLNNLQTGLPGVFQALASFSSLFMEVLDTVCTRSYAIK

SEQ ID NO: 850 - protein, 52 aa, Eucalyptus grandis
MAAPPAEQSGSASGGESQRSVPTPFLTKTYQLVDDPAIDAVISWNGDGSSFI

SEQ ID NO: 851 - protein, 52 aa, Eucalyptus grandis
MDPMDIVGKSKEDASLPKATMTKIIKEMLPPDVRVARDAQDLLIECCVEFIN

SEQ ID NO: 852 - protein, 121 aa, Eucalyptus grandis
MNSPLAQLVNPRRMHTYEPFDQFPMWGDTFKADKVKNLEASSSVIVHAVDDGLDKKFEYVSHESAENSSSRSDQEANRPDKVQRRLAQNREAARKSRLRKKKYVQQLESSRLKLAQLELEL

SEQ ID NO: 853 - protein, 293 aa, Eucalyptus grandis
FVYGIIPEKGKPVSGASDNLRAWWKEKVRFDRNGPAAIAKYRADHSIPGNGEDAATIGPIPHTLQELQDTTLGSLLSALMQHCNPPQRRFPLEKGVAPPWWPTGEEEWWPQLGLPADQGPPPYKKPHDLKKAWKVSVLTAVIKHMSPDISKIRKLVRQSKCLQDKMTAKESATWLAIINQEEALSRKLYPNSFPPVCSDSGFGSYVISDASDYDVEGADDEPKFEAEECKPFDPSAFGIGPRVSTGELLIHPLVSQIKGEVNETKTNSRLVSKRNQPSDEPKAKMDQKIYTCE

SEQ ID NO: 854 - protein, 150 aa, Eucalyptus grandis
STSSQRADKSLIMEHEFSSAKIKALLEILQSQCRGESANAELHGPMGCDDESLFENTGTGDSTYRVKAVKHTTVYSSSPPEGPIKAIVFSQWTSMLNLVEQNLIHFGINYRRLDGTMTLSARDKAVKDFNTDPEIVVMLMSLKAGNLGLN

SEQ ID NO: 855 - protein, 92 aa, Eucalyptus grandis
SEFGGELMNPRSNWLIVYNDDEGDMMLVGDDPWQEFCGIVRKIFIYTREEVQKMKPGTISAKDEDNLMVDEGVFSKKMTSDTLPSASDPKNC

SEQ ID NO: 856 - protein, 74 aa, Eucalyptus grandis
IEALKKRLDDVNAKYAVSVEFTKAMALNHLKNGLPRVFKALMEFSGACTKVFEALNNPREQVGSRENEPRVLPA

SEQ ID NO: 857 - protein, 125 aa, Eucalyptus grandis
QILPPNAKISKEAKETMQECVSEFISFVTGEASDKCHKEKRKTVNGDDIVWALGSLGFDDYAEPLKRYLNRYREVEGERASQNKVTGGESRNEKNLYGDESPEKQLGAASSSPLKFFDVADRSTN

SEQ ID NO: 858 - protein, 113 aa, Eucalyptus grandis
VNSVFELHKLLARPGAIEKVLGVVRQVRPAIVTVVEQEANHNGPVFVDRFNESLHYYSTLFDSLEGCASTQDKAMSEVYLGKQICNVVACEGADRVERHETLAQWRVRLGGAG

SEQ ID NO: 859 - protein, 114 aa, Eucalyptus grandis
SLFNTSKSNKHLWEQISSKMREKGFDRSPTMCTDKWRNLLKEYKKAKYQDRGSAKMSYYKEIEEILRERSKNNQYKSPTASALKVDPYMQFSDKGIEDAGMTFGPVEASGRPTL

SEQ ID NO: 860 - protein, 181 aa, Eucalyptus grandis
DLELKVRELETVMLGPSSDMPHTVDINFLVGSGQMSQETETLMEIISRRDLKEILCACAKAVEDNDTLKFECLISELRPMVSVSGDPIQRLSAYMLEGLIARLASSGSSIYKALKCKEPAGAELLSYMHILYDICPYFKFGYMSANGSIAEVMKDENIIHIIDFQIAQGGQWITLIQALAA

SEQ ID NO: 861 - protein, 58 aa, Eucalyptus grandis
MARSSCNQKLRKGLWSPEEDEKLFNYISRHGLGCWSSVPKLAGLQRCGKSCRLRWINY

SEQ ID NO: 862 - protein, 86 aa, Eucalyptus grandis
MASGMENRGEIPANLKKQLALAVRKIQWSYGIFWSISTRQPGVLEWGDGYYNGDIKTRKTIQAVELNTDQIGMQRSEQLRELYESL

SEQ ID NO: 863 - protein, 182 aa, Eucalyptus grandis
NIQRNEYHNLFNFISGKGLKIMNLGEQGADGVPGVLDVDDDDAVDPHLERIRIEAGVDESDEEDEDFVIDKDDGGSPTDDSGDDESDVSESGDEKEKEKYGKKESRKEVKASSSKKKAKAGDEEGSKKKKQKKKDPNAPKKAMSGYNFFLQTESEKMKRTNPGLSFGDVSREIADKWRGLSA

SEQ ID NO: 864 - protein, 55 aa, Eucalyptus grandis
MSFTGTQVKCKACEKTVYPVEQLSADGVAYHKYCFKCSHCKGTLKLSSYSSMEGV

SEQ ID NO: 865 - protein, 151 aa, Eucalyptus grandis
DKSSSPVPPQDQTGVHVYHPDWAAMHAYYGPRVALPPYYNSAVSSGHGPHPYMWGPPQPMMPPYGPPYAAIYSHGGVYGHPAIPLTPTPLAAETPKKSSANSDNGLVKKLKSFEGLAMSIGSGGDADSADDGTDKRSSQSADSGDSSDEDQ

SEQ ID NO: 866 - protein, 203 aa, Eucalyptus grandis
RFKQLLEEASQDIDHTTDYYTFRKKWGNDPRFEALDRKDRENLLNERVLPLKKAAEERAQAMRAAATSSFKSLLRDRGDITVNSRWSRVKDSLRDDPRYKSVKHEDREALFNEYIAELKAVEDREEKEAKAKREEQEKLKERERELRKRKEREEQEMERVRVKIRRKEAIASFQALLVETIKDPQLPGQSQKLNLTKILRTCE

SEQ ID NO: 867 - protein, 113 aa, Eucalyptus grandis
EIKNYWNTRIKRLQRTGMPIYPTEVCLQVSSENQETHNMGNLHTAGEDNCDLSQADPLEIPEVDFRKLELHLGFSSFWSTLLDVPPCGFGREAMCLSDAYCLPFPSSRSPKRL

SEQ ID NO: 868 - protein, 107 aa, Eucalyptus grandis
TTRIPAANLEDLFDNHNMARIRDVWAPNLEIEMQNIREAIEKYSYVSMDTEFLSGARPIGNFKTSSDYHYQTMRCNVDLLKIIQVGITLADEEGLFPQDCSTWQVQL

SEQ ID NO: 869 - protein, 85 aa, Eucalyptus grandis
MGRSPCCEGNGLKKGPWSSEEDKKLLDFIQQHGHGSWISLPKRAGLNRCGKSCRLRWINYLWPDIKRGSFSPEEEQTILHLHSVL

SEQ ID NO: 870 - protein, 85 aa, Eucalyptus grandis
MPWKTGLTGSKTEEDKALQLCRERKKSVRQAVDGWGSLVYAHFMFVQSLRNVGTALTKFFETESPNGSPSYASMSTTPEPIALTE

SEQ ID NO: 871 - protein, 104 aa, Eucalyptus grandis
GLLRCSKSCRLRWTNYLRPGIKRGSFTDQEEKMIVHLQALLGNRGAAIASYLPQRTDNDIKNYWNTHLKKKLKKLQGQANPDDDDHNHHPQGFNATSHSNPKGQ

SEQ ID NO: 872 - protein, 102 aa, Eucalyptus grandis
MARTPCCEKMGMKKGPWTPEEDQILISHIHQFGHSNWRALPRQAGLLRCGKSCRLRWINYLRPDVKRGNFTDDERDTIIELHQVLGNRWSAIASRLPGRTDN

SEQ ID NO: 873 - protein, 125 aa, Eucalyptus grandis
WTAEEDKKLINFILTHGQCCWRAVPKLAGLLRCGKSCRLRWTNYLRPDLKRGLLSEYEEKMVIDLHAQLGNRWSKIASHLPGRTDNEIKNHWNTHIKKKLKKMGIDPLTHKPLVTNNDNTTDQQP

SEQ ID NO: 874 - protein, 114 aa, Eucalyptus grandis
MDKKPDDDSGKSQDVEVRKGPWTMEEDLILINYIANHGEGSWNSLAKAAGLKRTGKSCRLRWLNYLRPDVRRGNITTEEQLLIMELHAKWGNRDAHKSHNFSLHRFYNIIPIDH

SEQ ID NO: 875 - protein, 127 aa, Eucalyptus grandis
NGDSVKDDLDTDEYETHATVLDKLLAWEKKLYEEVKQGEHMKLEYQKKVALLNKQKKRGASGESLEKTKAAVSHLHTTYIVDMQSMDSTASEINHIRDKQLYPKLAQLVDGMANMWEKMRMHHDKQE

SEQ ID NO: 876 - protein, 153 aa, Eucalyptus grandis
PETVHVQNYSPIHQMGIDGFFPAHPSPQNPSYHSYSPNNRPNFPPPSPQTSQWDYFWNPFSSLDYYGYPTRSSIDHMAMDDETRGLRQVREEEGIPDLEEETEHEECDHHSYVDEDRGNRDANFPTEEVLVEDVDDEEEDEDEGNRHSCESED

SEQ ID NO: 877 - protein, 62 aa, Eucalyptus grandis
VLRAQLMELTDRLRSLNSVLQVVEVVSGLAIDIPEIPDPLMNPWQLPCPMQPITASADMLQL

SEQ ID NO: 878 - protein, 135 aa, Eucalyptus grandis
LTLTAASTVIFAELSWTPGDLIQAEDRAHRIGQVSSVNIYYLLANDTVDDIIWDVVQSKLENLGQVLDGHENTLEVSASQPTRNSPAKQKTFNSPGKQHTFNSPGKQQKFNSPGKQTTLDSFMKRCNSGDPSEHQ

SEQ ID NO: 879 - protein, 138 aa, Eucalyptus grandis
MALEAINSPTAASAPFQFMEEPLSSRFLEPLNKRKRSKRPHHPPSEDEYLALCLIMLARSGAAPKPNHHASPAPLPPPPPPAPTKPEEAAATATATAAPANNLSYKCAVCGKGFPSYQALGGHKASHRKSAAAAAAAA

SEQ ID NO: 880 - protein, 124 aa, Eucalyptus grandis
AIALVLAKREIIRSIGTGLDWSSPSAGSSTSLPEIKGTLVICPVVAVTQWVGEINCSTAQGSTKVLVYHGANRGKTADQFKNFDFVVTTYSLVEGEYRKFVMPPKKKCIYCGKLLYKEKMTVHL

SEQ ID NO: 881 - protein, 196 aa, Eucalyptus grandis
PDLPGDDLALEFEEFDFQSLFDELSPDAAGLLDASDVDASSPGSLSSWIGEIEGMLMKDDEEAVAVEPSQEVFDRFFAGLLVDSPEGGPAEATDGASDKESNSSDGGGGGGGERDEKLVVGDNELSEDADDDDPVSKKQRRQLRNKDAAARSRERKRSYVKELEMKSKYMEGECRRLGRLLQCFVAENQALRLNLE

SEQ ID NO: 882 - protein, 102 aa, Eucalyptus grandis
VISSQSMHLGVLATASHAVTTQTLFVVYYKPRTSQFIISLNKYLEALNNKFTVGMRFKMRFEGEDSPERRFSGTIVGVEDFSPQWDNSSWRSLKVHWDEHAS

SEQ ID NO: 883 - protein, 69 aa, Eucalyptus grandis
FNQLDPRINRKPFSEEEEERLLTAHKLCGNKWAMIARLFPGRTDNAVKNHWHVIVARKQREQSNNARGR

SEQ ID NO: 884 - protein, 74 aa, Eucalyptus grandis
QKYFIRQSNVSKRKRRSSLFDIVAEESVDVPMGSRDFFAVDEQQQETEVNDALQQLPPDVDEECESMDSTNSNT

SEQ ID NO: 885 - protein, 61 aa, Eucalyptus grandis
SSSSRHESRHPIPLLTNGQPMSGEIPCASIDSPSVRTTSGPLGPFDKHVHSLPYVDPRQPV

SEQ ID NO: 886 - protein, 142 aa, Eucalyptus grandis
SPPLSAHVASHKGLHQASKPKIHECNICGSEFASGQALGGHMRRHRSAPPPTATSADATSPTNPPAAAAITTEKSRNILSLDLNLPAPNGGGSPPPSAPPPGELEVPIRHKSTAHHTSLARLGGLPLLKKKEKTGSHVNQCN

SEQ ID NO: 887 - protein, 139 aa, Eucalyptus grandis
AVSDINLVSNSTHSSYEDGGSPRRITSESDPKDAPMGTESLLSAPEAVELSDTGTSFTFKMDSSMQRKPPVDESPRMHPLPMNLTTEEGDNNVSCQLNLSLASSLLQVDHSQQFNRLNVLGSETSKSPDARSNASITES

SEQ ID NO: 888 - protein, 36 aa, Eucalyptus grandis
HPEYNSSPVGYMETNKARLVLEKDDLGLNLMPPSTC

SEQ ID NO: 889 - protein, 176 aa, Eucalyptus grandis
NIGAKADVFHILSGMWKTPAERCFMWLGGFRSSELLKILGNHLEPLTDQQLMGICNLQQSSQQAEDALSQGMEALQQSLVDTLSSTTLSPTGSGNVAEYMGQMAIAMGKLATLENFVHQADLLRQQTLQQMHRILTTRQAARALLVINDYISRLRALSSLWLARPRTENICSAKLF

SEQ ID NO: 890 - protein, 33 aa, Eucalyptus grandis
KKRLMVASAFGEDEKAGRQTRLTVEDLNYLFMA

SEQ ID NO: 891 - protein, 51 aa, Eucalyptus grandis
MRDLCLDQREMASGSSRVEARADAEMALYNELWQACAGPLVAVPRQGERVF

SEQ ID NO: 892 - protein, 77 aa, Eucalyptus grandis
MLSPSGSSPLAQSTGRHPLYRGVRSRSGKWVSEIREPRKTTRIWLGTYPNPEMAAAAFDVAALALKGSDAALNFPHD

SEQ ID NO: 893 - protein, 95 aa, Eucalyptus grandis
FPQGHMEQLEASTNQELNQRIPLFNLTSKILCQVVNVQLLAEQETDEVYAQITLIPAGNLMEPTSPDPVSAETPRTRVHSFCKVLTASDTSTHGG

SEQ ID NO: 894 - protein, 79 aa, Eucalyptus grandis
MGSNINFKNFSTDPTPTNNRPPGNTLLTRQPSVYTLTFEEFQNSIGKDFGSMNMDELIKNIWSAEENQSMASASGACGG

SEQ ID NO: 895 - protein, 57 aa, Eucalyptus grandis
MQACGSYEYSEQYHDEVKPAYGPQISAHSQYLGYNSLRLGLPLRVAEEPVYVNAKQY

SEQ ID NO: 896 - protein, 167 aa, Eucalyptus grandis
PDVPLPSPAGDVTDAEWFYVMSLTRSFSAGDGIPGKALSTGSLVWLTGARELESYKCDRAKEAELHGIRTMVCIPTGDGVLELGSCDVIPENWGLVQRAKSLFGSDLLLPKHPPPPPPPFQLHHDHSDISFADIGIIAGVQENDFAPHDDHEKKVKKKQPLVEGAGG

SEQ ID NO: 897 - protein, 125 aa, Eucalyptus grandis
VAGMTRGRRDGILKSEKTRHVVKIGPMHLKGVWIPYERALEFANREKITEYLYPLFVHDIGALLYHPSNPSGATSRAGNAQNTLAAIDRRRNEARMAASIQGQAVSGVLVSPVAQTAGGRPSVDR

SEQ ID NO: 898 - protein, 120 aa, Eucalyptus grandis
NNLSLYDNGVGSTPRPRSNAEQLIFRAALQDLSQPKSEETPPDGALAVPLLRHQKIALSWMVKKETAINCCGGILADDQGLGKTVSTIALILKERPPTFKQCQENPKQELQTFDLDEDEN

SEQ ID NO: 899 - protein, 58 aa, Eucalyptus grandis
MSLSAKSESIQIRDVWDDNLDEEFARIREIVDDYPYVAMDTEFPGIVVRPVGNFKNSS

SEQ ID NO: 900 - protein, 94 aa, Eucalyptus grandis
MADSDNDSGGHNNANSESAAALAREQDRFLPIANVSRIMKKALPANAKISKEAKETVQECVSEFISFITGEASDGSSSIGGGGGGVVNSGGGSA

SEQ ID NO: 901 - protein, 169 aa, Eucalyptus grandis
KINPDRWEFVNQGFQKGNKHLLKNIKRRCKFSEHRKTSSSTVTSDYQKAENEVELNTLKKGQEVLKTRSLKLREERKSFQHEIEQVAERVRHAECRNQQIFLFLTKAAKSPNFVHHLIQKKSQKRDLETCESSKKSKLLGSDAEATKFLNEAMDHMIKSPNVDCLRISD

SEQ ID NO: 902 - protein, 266 aa, Eucalyptus grandis
GILAAAAHAAANNSPFTIFYNPRASPSEFVIPLAKYNKAFYTQVSLGMRFRMMFETEESGVRRYMGTITGISDLDSVRWKNSQWRNLQVGWDESTAGERPSRVSMWEIEPVVTPFYICPPPFFRPKFPRQPDDESDVENAFKRAMPWLGDEFGIKDTPNSIFPGLSLMQWMSMQQSNPLQATQSGLLPPMLSSTGLHNNLGIDDPSKLLSFQAPTQGLQFNKTNPQNQVSQLLQPSMAWSQQHQLQQLLQNPLGHQQQQQQQQLQR

SEQ ID NO: 903 - protein, 101 aa, Eucalyptus grandis
VPSMKPEYPVPNGIGASDFGESFRFQKVLQGQENLGFGTPYDGIETQSHRLSEVRRHHPDDSGGSEAAATRNGITNPSVNASVTYKGMGFGESFRFREVLQ

SEQ ID NO: 904 - protein, 142 aa, Eucalyptus grandis
PPSPLLPPPSIPKTLLRIDSGSPLRPPPPPAAMDAAPPGGGGGGGGPAPFLLKTYEMVDDAGTDEIVAWSSGKTSFVVWNPPEFARLLLPTYFKHNNFSSFIRQLNTYGFRKIDPERWEFANEEFVKDKKHLLKNIHRRKPI

SEQ ID NO: 905 - protein, 80 aa, Eucalyptus grandis
MYVLEGVTPCIQSMQLQAGDTVTFSRMDPEAKLIMGFRKASTSMMQDSQLAAVSNGNHSSEALISGGFENVPMISGYSSL

SEQ ID NO: 906 - protein, 30 aa, Eucalyptus grandis
RTGKAESECLCPRNSGLLDALVHESKTMSS

SEQ ID NO: 907 - protein, 69 aa, Eucalyptus grandis
MNQVADRQIPFYNLPSKILCRVINVQLRAEPETDELFAQVTLLPVPNQDETAVEKETGIPCLQRPRVHS

SEQ ID NO: 908 - protein, 60 aa, Eucalyptus grandis
TFMGICSLQHSSQQAEEALSQGLEQLQQSLVDTIAGGPSIEGMQQMAIALGKLTNLEGFV

SEQ ID NO: 909 - protein, 139 aa, Eucalyptus grandis
IGYPKMPLQASISTQSDFQADGSGHGVPIPQGADSGSLGISALPTIQRDSGVHVKQTTSESSREDSDDEEFEGDTGTTENKDPAEVRRARRMQSNRESARRSRRRKQEHMSELENQVEHTGLLKRLTDMNQKYDVASVD

SEQ ID NO: 910 - protein, 153 aa, Eucalyptus grandis
GTGGNWIALPRKAGLKRCGKSCRLRWLNYLRPDIKHGGFTEEEDHVICTLFFTIGSRWSVIASKLPGRTDNDVKNYWNTKLKKKLMKQLASLKTVPESNFDYQVCAQNSASIDPETKNREYAANSMGFPKQNFNPGIPTSNSSLLCPPSLTEV

SEQ ID NO: 911 - protein, 118 aa, Eucalyptus grandis
TSCADNCRLSLSLIQAPVFSSILSKKLLCFFSLSLSTMARPQQRYRGVRQRHWGSWVSEIRHPLLKTRIWLGTFETAEDAARAYDEAARLMCGPRARTNFPYNPNMSQSLRRSSSRRH

SEQ ID NO: 912 - protein, 88 aa, Eucalyptus grandis
MEAAAAAAKVVGEAEELPKTIVRRVVKEKLSRCSDDGDVSLHKDALLAFSESARIFIHYLSATANDICKESKRQTINADDVLKALEEM

SEQ ID NO: 913 - protein, 84 aa, Eucalyptus grandis
PVHEQGQLRGVDRLEGSHWVPIGWERISALAQTVQVDAGWGMQLDSMDDDEDLTVADMETPYWERPAGPIWWCHFSAGHPAVEA

SEQ ID NO: 914 - protein, 184 aa, Eucalyptus grandis
MKPTIDLEVEAVSENDSEISSQVASNLSNQEPSMGPSNDSLANSSYLISPSAVGSGSETVFLDLSLGCSNDESSGRDSVGVAFSSTSECSNEPESHPAAAGPTTSRVFSCNYCQRKFFSSQALGGHQNAHKRERTLAKRAMRMGMFSSQRYSSLASLPLHGSPTVRDLGIKAHSSVHQVHQGML

SEQ ID NO: 915 - protein, 96 aa, Eucalyptus grandis
MWNPSAAQEDDDSWEVRAFAEDTSNIMGATWPPRSYTCSFCRREFRSAQALGGHMNVHRRDRAKLHQSQFRPLANQNSPFASCSSPSSSTLLFPNQ

SEQ ID NO: 916 - protein, 176 aa, Eucalyptus grandis
MAELDYCQTKSSPGAAATRLKLFGFNVSDEEDSAVSDPITVGANGGGGGGGGKATPSGSPEGSVPVGGGGERKYECQYCCREFANSQALGGHQNAHKKERQQLKRAQLHASRNAAVSSLVRNPIISAFATPPHLLATVGPVVVTGAAPTSPSWVYVPRGAPPFQVSHGCVFTTGQG

SEQ ID NO: 917 - protein, 138 aa, Eucalyptus grandis
EHQSNPWHQSSSAANHRQLNLELALEPCSPSSSSSPASLHPLAVPAKDNKLYSCNFCQKKFYSSQALGGHQNAHKLERTLAKKSRDLCSAAKPPAATSNGHHVRPSFQSVVYENQPRLARHVGDDMRYAGTNPLYGSS

SEQ ID NO: 918 - protein, 68 aa, Eucalyptus grandis
QLSSVDREARVLRYREKRKNRKFEKTIRYASRKAYAETRPRIKGRFAKRADIEAEAERMFGFGVVPSF

SEQ ID NO: 919 - protein, 224 aa, Eucalyptus grandis
RGPWTVEEDLTLVNYIANHGEGRWNSLARSAGLKRTGKSCRLRWLNYLRPDVRRGNITLEEQLLILELHSRWGNRWSKIAQHLPGRTDNEIKNYWRTRVQKHAKQLKCDVNSKQFKDAMKYLWMPRLVERIQAASASVSTATVAAAAMAAPPTMATTAASNIGGMAFPPALAGMGGDFRGGRVNVAPSYSTPENSCTTASSDSFGAQVSPVSDLTDLDRVLTLS

SEQ ID NO: 920 - protein, 286 aa, Eucalyptus grandis
MSLWADYDHAAATDLSAFWPPPATPPPPAPAPPLSQESLQRRLQALIEGARGRDGEEGAGGPAAAWTYTIFWQSSGDYSGPVLGWGDGYYKGDGRARSRGSACSQAEQEHRKKVLRELNSLISGAPPADDAVEEEVTDTEWFFLVSMTQSFAGGVGLPGRAYFSSNPAWVTGAERLGNCGCDRARQAQIFGLQTIACVPVLNGVVELGSTEPIYQSSDLISGIRGLFNFHESEMGCGGRVLNSEHDPASLWICDPPVTMEINDRPMTFQIENPSSSSLTESPSAIC

SEQ ID NO: 921 - protein, 101 aa, Eucalyptus grandis
MVPPFPTAELPLNENDSQDMVIYHVLNEAMSQNNSSLPHPNQSGSPSSGGSLEPSRGITKKHYRGVRRRPWGKFAVRFATRYATGPEFGSGHSRQPRRRRW

SEQ ID NO: 922 - protein, 139 aa, Eucalyptus grandis; identical to SEQ ID NO: 909

SEQ ID NO: 923 - protein, 222 aa, Pinus radiata
MGQQSLIYSFVARGTVVLAEYTEFKGNFTGIAAQCLQKLPASNNKFTYNCDNHTFNYLVEDGFAYCVVADESVGRQVPMAFLERVKEDFKRRYGGGRADTAVANSLNRDFGSKLKEHMQYCIDHPEEISKLAKVKAQVSEVKGVMMDNIEKVLDRGEKIELLVDKTENLRFQAQDFQKKGTELRRKMWFQNMKVKLIVLGIVVALILIIVLSVCHGFNCSKK

SEQ ID NO: 924 - protein, 105 aa, Pinus radiata
MGRGKIEIKMIENTANRQVTFSKRKGGLLKKAHELSVLCNAEIALIVFSNTGKLHDWSSSSMKKVMEKYQKSDQGLGLMDYQQQQLLCEMKRITKENESLRARLR

SEQ ID NO: 925 - protein, 102 aa, Pinus radiata
VPSPLVPTRENYFVRYCKQHSDGIWAVVDVSLDTLRGNPQPHPNCPPSTLRCRRRPSGCLIQEMPNGYSKVTWVEHVEVDERAVHRIYDKLVSTVSRRTPYR

SEQ ID NO: 926 - protein, 176 aa, Pinus radiata
LSNIEPKQIKVWFQNRRCREKQRKEASRLQTVNRKLTAMNKLLMEENDRLQKQVSQLVYENGYMRQQLQNASVAATDTSCESVVTSGQHQHNPTPQHPPRDASPAGLLSIAEETLTEFLSKAKGAAVDWVQMPGMKPGPDSIGIVAISNTCNGVAARACGLVGLDPTKVAEILKDR

SEQ ID NO: 927 - protein, 68 aa, Pinus radiata
ILPEGPPESRSVIDNRQVEGSILTIAFQILVNDLPSAKLTLESVETVNNLISCTAQRIKAALHKVEDV

SEQ ID NO: 928 - protein, 68 aa, Pinus radiata
MGRALGRTEIKRIENEVSRNVSFRKRRRGLLKKAAELSILCDATVGVVVFSPAGKLSEYASTSESNGY

SEQ ID NO: 929 - protein, 126 aa, Pinus radiata
IRNPTNRHSSFYKRKGGLLKKAFELAVLCDAEVALIIFSETGRIYEFASHDDVTTVLAKYRIQTKTAGNAMPSSLQKTEFDQLQVRMLQEKIDNLEKTKKHMVGENLESLTWKELQQVEKKLSKAT

SEQ ID NO: 930 - protein, 90 aa, Pinus radiata
LFHPARIGGFGGGQVILPLAHTVEHEEFLEVIKLENHGLTQEEALLSRDMFLLQLCSGLDENAVGACAELVFAPIDASLADSSPLLPSGF

SEQ ID NO: 931 - protein, 138 aa, Pinus radiata
MGRGRVQLRRIENKINRQVTFSKRRNGLLKKAYELSVLCDAEVALIIFSTRGKLYEFASSSMNKTLERYEKCSYAMQDTTGVSDREAQNWHQEVTKLKGKVELLQRSQRHLLGEDLGPLNVKELQQLERQLEVALTHL

SEQ ID NO: 932 - protein, 161 aa, Pinus radiata
MGQQSLIYSFVARGTVVLAEYTQFTGNFTTIANQCLQKIPASNNKFTYNCDRHTFNYLVEDGYTYCVVADESVGRQLPIAFLERIKDDFKKRYGGGKADTAVAHSLNKDFGPKLKDHMQYCVDHPEEINKLAKVKAQVSEVKGVMMENIEKVLDRGEKIEL

SEQ ID NO: 933 - protein, 54 aa, Pinus radiata
FPTGNGGTIELLYMHTYAATTLASARDFWTLRYTTVLEYGSLVVCERSLSGTQG

SEQ ID NO: 934 - protein, 123 aa, Pinus radiata
RREACCPQPSLMARAPHHHQQQQHHQHHQQEASRMVTSLEVDIDTACSSKPNDSIDALKSKIACHPHYPQLLAAYMDCQKVGAPPEVVTVLDEIIQENQLGRHSGTMDIGVDPELDQFMEAYC

SEQ ID NO: 935 - protein, 113 aa, Pinus radiata
MGRGKIEIKKIDDVTSRQVTFSKRKMGIFKKAHELSVLCDAEVAVLIFSNTGRLYDYASSRCMERTIERYEKCTKAINCPTSDPIVENKSPIQEGIEILRQKLRALQRLQRNL

SEQ ID NO: 936 - protein, 162 aa, Pinus radiata
VQEVAHIANGSHPGNCISLLRVNACSTSQNVELILQESCTDASGSVIVYAPVDVPAINIAMSGEDPSYIALLPSGFAILPDGQNRSSTSSLLEGANSSSNSSNSSGLDSPLTRGGSLLTVAFQVLVSHLPTAKLGLDSVTTINNLICNTVQQIKSALHCADV

SEQ ID NO: 937 - protein, 114 aa, Pinus radiata
NRRARTKWKRNEVECDNLKRCCESLREENRRLEKEVQSLRAMKVPQSPNSMPLAAATLAMCPACEGLAIKNRGAATSSTAKSQQSLLTIMGIGDVNMISKNNQTPSMGMGDEMN

SEQ ID NO: 938 - protein, 120 aa, Pinus radiata
MLKTLERYQKCSYVLQDATVSDREAQNWHQEVGKLKAKVELLQRSQRHLLGEDLGPLSIKELQQLERQLEVALTHVRSRKTQVMLEMMDELRRKERILQEVNKSLRKKLQEAEGQAFNAM

SEQ ID NO: 939 - protein, 110 aa, Pinus radiata
SDTANSSELLGSSRSDGDHPHHGHHDQQQQQQENHMVWQNSRLKADVLQHPLYDQLLAAHVACLRIATPVDQLPKIDAQLAQQHHVVAKYSVLGRNQLLTGEEKEELDRF

SEQ ID NO: 940 - protein, 86 aa, Pinus radiata
RNYLGEYTGELISHREADKRGKIYDREDSSFLFNLNDQYVLDAYRKGDKLKFANHSPTPNCYAKVIMVAGDHRVGIFAKERIAAGE

SEQ ID NO: 941 - protein, 128 aa, Pinus radiata
MGRGKIEIKMIENATNRQVTFSKRRGGLKKKAQELSVLCNAEVALIIFSSTGKLHEWSSSSSFFMLQKSMKKILERYQKSEQGLGLMDYQHQQLLCEMRRITKENESLQERLRHMNGEEVNSLKLPEL

SEQ ID NO: 942 - protein, 86 aa, Pinus radiata
AICSISFHPYPKDADKHLLARQTGLTRSQVSNWFINARVRLWKPMVEEMYMEELREAETQNHAADSKVTTESGQNNEETVSKEGAG

SEQ ID NO: 943 - protein, 58 aa, Pinus radiata
GAGYSSVSGIDEHAAGFCSQLVFAPIDASFADDAPLAALWFPSNSSRIWIRMFLLQNG

SEQ ID NO: 944 - protein, 112 aa, Pinus radiata
DGGGRGAGHFVMEQFIPEQAVISDSSISSVKTEVCSGSGGQFELIRRKEEGRCGRAYAEPSFVVTPLVTSLPPQQQEGRMVTSLAVDMDSSCSCKPNEADAMRAKLFAHVHY

SEQ ID NO: 945 - protein, 134 aa, Pinus radiata
ARGKTQMRKIESATSRQVTFSKRRNGLMKKAYELSVLCDAQLGLIVFSPRGKVYEFSSTCMQKMLARYEKCSEGSDTSTSKEQDVQCLKRESANMEERIEILESMQRKMLGEELASCALKDLNQLESQVERGLR

SEQ ID NO: 946 - protein, 110 aa, Pinus radiata
SLVWGALKMGKTKMEIKRIQNPSRRQVTFSKRKNGLLKKAFELSVLCDAEVALIIFSETGKICEFASHDDMATILEKYRIYTETHGNMESSSVQSVKIGESQLKALREKM

SEQ ID NO: 947 - protein, 92 aa, Pinus radiata
KLPKEARQKLLDWWTRNYKWPYPSESQKIALAESTGLDQKQINNWFINQRKRHWKPSEEMQFVVMDSPNPHNAAFFLEGHLRTDGTAFSMDC

SEQ ID NO: 948 - protein, 155 aa, Pinus radiata
FSCVSKAAMILAEHSEGDAELEEVAGECLERVPPLHSRFTHTTKRKMYSFLMDGPFVYCAIVDEALGKPQVFVFLEHVRDEFKKLLKNRGCEGLSSCCFDKEFGPVYKRLVAPLVGVPQIEKDRLMEEESKSQPAKTHPVQVNNSPKDSLPVYDN

SEQ ID NO: 949 - protein, 165 aa, Pinus radiata
DGSLVICERSLSAAQGMPMVSQSQSFVHGELLSSGYLIRPCEGRGALVIMVDHRNLEASSVPEALRPLYESSTFFAQKMTVEASYHLQGKVQPEMISLSKKLQQPCNVRSYSQRLCRGFNEAVNTLPDDGWMSLSKDGLGDVTICESFVKLPEPNASQIAYVNSM

SEQ ID NO: 950 - protein, 153 aa, Pinus radiata
RALQQLGMIQQHAWRPQRGLPERSVSVLRAWLFEHFLHPYPKDADKHMLARQTGLTRNQVSNWFINARVRLWKPMVEEMYVEETKEAEVDHGSNDKTGKESGEKKEDALSKEGAAGNNGNIHEQQSGKISKLDNIAQDGGADEKPAGVPKSEN

SEQ ID NO: 951 - protein, 107 aa, Pinus radiata
MNLMESFEAKGKGEKRRTVRGKTQLKRIENGTSRQVTFCKRRNGLLKKAYELSVLCDAEVALIVFSPRGKLYEFANPSMQKMLERYEKCSEGSNPTSTAKEQDVQCL

SEQ ID NO: 952 - protein, 217 aa, Pinus radiata
MVRGKTQMKRIENDTSRQVTFSKRRNGLLKKAYELSVLCDAEVGLIIFSPRGKLYEFASPSMEEILEKYKKRSKENGMAQTTKEQDTQYSKHSKQKLANMEEQIRILESTQRKMLGEGLESCSMAELNKLESQAERGLSHIRARKTEILVDQIECLKRKERLLSEENALLSRKWVDRQSVDGSGSTSSSIGLGSIEQIEVETQLVIRPPNAQDHCSV

SEQ ID NO: 953 - protein, 183 aa, Pinus radiata
MESEEDKISPENKKRRLKTPQQVEGLESFYAEHKYPSEAMKSQLSEELGLTEKQVQGWFCHRRLKDKRLMKEEASNNGKQDPHNGIMQDSVNGVKQDSSGSGKKSDHQRHSRCKEVESQRFANAMDYPAAVLASELRDHDLFKVNHDNEDTFAGSSSASQDRSSLQSGNPYEAEARRRPFQNG

SEQ ID NO: 954 - protein, 105 aa, Pinus radiata
ALFGAVQSLPVFTFANQAGLDMLETTLVALQDISLEKILDDNGRKSFCSDIAQIMQQGYAYLPAGVCVSSMGRPASYDRAIAWKVLNDEENPHCIAFMFMNWSFV

SEQ ID NO: 955 - protein, 85 aa, Pinus radiata
QRIWHEPASNNKFTYNCDNHTFNYLVEDGFAYCVVADESVGRQVPMAFLERVKEDFKRRYGGGRADTAVANSLNRDFGSKLKEHM

SEQ ID NO: 956 - protein, 119 aa, Pinus radiata
VNSNQSNMLILQESCTDASGSFVIYAPVDIVAMNVVLSGGDPDYVALLPSGFAILPDGPKCMAVTNSGINDLGSGGSLLTVAFQILVDSVPTAKLSLGSVATVNSLISCTVDRIKAAVT

SEQ ID NO: 957 - protein, 90 aa, Pinus radiata
QLLFHLRSQSISPLVTCLRSHRAPPWPTPISWLCIIIRVMTEEQMETLRRQICVYSTIGSQLVEMHRAMSQQQAFFSGRLCLWDNTCFMI

SEQ ID NO: 958 - protein, 103 aa, Pinus radiata
MGRGRVELKRIENKINRQVTFSKRRNGLLKKAYELSVLCDAEVALIIFSSRGKLYEFGSAGYGIEISGLFSGILYYNIRVGEGCEGEKRGCKVYSVICFKGKS

SEQ ID NO: 959 - protein, 63 aa, Pinus radiata
MVRGKIQMKRIENTASRQVTFSKRRNGLLKKAYELSVLCDAEVGLMIFSPGGKLYEFANTSME

SEQ ID NO: 960 - protein, 60 aa, Pinus radiata
MLLQNVPPALLVRFLREHRSEWADCNIDAYSSATMKANAYNVPGSLGGITGSQVILPLAH

SEQ ID NO: 961 - protein, 52 aa, Pinus radiata
TSRLHFVDQQLRQQRALQQLGMIQQHAWRPQRGLPERAVSILRAWLFEHFLH

SEQ ID NO: 962 - protein, 154 aa, Pinus radiata
AVVIWMGDPERTKMPPIKITITITIMITSSSRRGGNVTTDTLLVKFRRWKRCLRSVHILMTNKGSGSALNWALKPRQVKFWFQNRRTQMKAQQDRSDNAILRAENENLRNENVALREAIKNGACPNCGGSTSLGEMPGFDEHHFRIENTRLKEE

SEQ ID NO: 963 - protein, 143 aa, Pinus radiata
RILKLEIPTSYLVCKARKMGKKKVEVKLIQNPTSRQGCFYNRKCGLLKKAFELSVLCDAEVALIIFSQTGKIYEFASHDDVNAILAKYRIQTGTTTNAMPSSLQNTEPETLHEETNMLGKRKKVEKLHEKINMLEKRGKNMVW

SEQ ID NO: 964 - protein, 123 aa, Pinus radiata
DHHAVEDRELKNHLLRKYSGYLSSLKQEFMKKKKKGKLPKDARQKLLDWWSLHDKWPYPSETEKIALAECTGLDQKQINNWFINQRKRHWKPSEDMHFMVMNSHSPHSAALYVERHMMTEGYL

SEQ ID NO: 965 - protein, 71 aa, Pinus radiata
MEHLNAAAAQASSSLYGVSMAEYGDVGVSSMMALMTQHEPHESESTMTTSMPSSFSSFHGHAECLLSAAMF

SEQ ID NO: 966 - protein, 111 aa, Pinus radiata
MGRGKIEIKKIENSVHRQVTFCKRRGGLMKKAYELSVLCDADVALIVFSSRGKLYELGTSNNNNNSMRSILERYQKCSQTAKHMNFSNNTSDEKMKQEINLLKHKLISTYQ

SEQ ID NO: 967 - protein, 106 aa, Pinus radiata
MNYEQRLIAAARLADNLNSTTAKEFDIPSAEEVAEKCSEWGVTAQLKAHQAQGLSWLIRRYAIGVNVILGDEMGLGKTLQAISLLAYLKDRRKCPGPFLVLCPLSV

SEQ ID NO: 968 - protein, 257 aa, Pinus radiata
SVDVLTAFSTGNGGTIELLYMQMYAPTTLASARDFWTLRYTSVLEDGSLVVCERSLSGTQGGPSMPAVQQFVRAEMQPSGYLIRPCEGGGSLIHIVDHMDLEPWSVPEVLRPLYESSTVLAQKVTMSALRHLRQIAQEASSDVVLGWGRQPAALRTFSQRLCKGFNEAVNGFTDDGWSLMGNDGMEDVTILVNSSPSKLFGQQFASSDGLPALGGGILCAKASMLLQNVPPALLVRFLREHRSEWADSNIDAYSAAS

SEQ ID NO: 969 - protein, 135 aa, Pinus radiata
MAMEERSGDLLKGCGLSENALDAISEGSIQNHWSWSEVKQLSVTLLRALDAGIEHSLLGSMMSIDRYAAAESFHRLAWAYAHVPDLHIMWLLHLCDAHQEMQSWAEAAQCAVAVAGVIMQALVGRNDAVWGKEHV

SEQ ID NO: 970 - protein, 128 aa, Pinus radiata
RGRVQLRRIENKISRQVTFSKRRNGLMKKAAELSILCDAEVALIVFSNKDKLYEFASSSMTKILERYRKRSNLIQDIGKDPQNSDIELTRLKEEVDRLQRSRRHLLGEDLHQLGATDLQHLEQQLEEA

SEQ ID NO: 971 - protein, 147 aa, Pinus radiata
MDSFEAKGKGEKRRTVRGKTQMKRIENATSRQVTFSKRRNGLLKKAYELSVLCDAEVALMVFSPRGKLYEFANPSMQKMLERYEKCSEGSKTTSIAKEEDPKALKREIANMEERIEILERTQRKMLGEELASCALKDLNQLESQVER

SEQ ID NO: 972 - protein, 45 aa, Pinus radiata
MEKQNSGEDSDSKGQLDNGKYVRYTNEQVETLERAYNECSKPSTS

SEQ ID NO: 973 - protein, 97 aa, Pinus radiata
MGAFALLSSWIDAATNPKYRKKRKQFQTVELRVRMDCEGCERKVRNALNSMKGVSSVEVERKQYKATVTGYVDANKVLKRVRQTGKKAELWPYKPYH

SEQ ID NO: 974 - protein, 135 aa, Pinus radiata
FSNTWFSGNLLAPGANKQMHLDSSSTGAPGLSNVLIGSKYLKAAQQLLDEVVNVGKGIKPDSAKHQKSQSWIGTTANKENSGAEGGGKDGAAAAPTWRSTSAQETNDRPSELSPAERQELQMKKAKLVAMLDEVD

SEQ ID NO: 975 - protein, 93 aa, Pinus radiata
YSEVRTRARFWRRKGRVRRFKYTCKSAGHPSIRKRIKDGKGQPCRQYTPCGCQLTCGKQCPCLRNGTCCEKYCGCSKSCKNRFRGCHCAKSQC

SEQ ID NO: 976 - protein, 114 aa, Pinus radiata
ADESLWIPNLDAGKETLSYEEYMRQFPSTITPKPIGLATEATRETGMVITNSLNLVETLMDVDHWKEMFPCMISRAATVDVISSGMGGTRNGALQLMYAELQVLSPLVPAREYF

SEQ ID NO: 977 - protein, 148 aa, Pinus radiata
QSENIMSTRIPSSFSSFHGHADCLLSAAMFQGSQGDHKLNPQPGMNQQLVSEQSIMSDSSMPFVKTKACSGLRNQFEFHREQPGNCYTDQSSNIPLSPIVTSLASQARGEARMIPSLDANSAHFNVDNEEHAIKSKILAHPQYPSLLG

SEQ ID NO: 978 - protein, 107 aa, Pinus radiata
MRNPICTNCGGPAVLGEMSFEEQQLRIENARLKEELDRLCALAGKFFGRPIPSMPSVPLMPKSSLDLGVGGMPTSLPSASADLMHGPAGGRTGNIIGIERSMLAELA

SEQ ID NO: 979 - protein, 251 aa, Pinus radiata
MMMSGGRMYGGPNVLVTANENISRSADALEALLSSPVFNGSRSVANLEEVIGNVSKRSFYNSFDQEETGDEDLDDCIHPPEKKRRLTADQVQFLERSFEIENKLEPERKIQLAKELGLQPRQVAVWFQNRRARWKTKQLERDYDILKSRYENLRVDYDSLLKEKDKLRAEVTFLTDKLHDSDHEALTKDSESADKKVYPQPASHSDCVGEPERSTAAKDTPPGCKHEDLLSSGTDSSGVLDEDSPHHVDCG

SEQ ID NO: 980 - protein, 128 aa, Pinus radiata
KIENTTSRQVTFCKRKNGLLKKAYELSLLCDAEVALLIFSTSGRLYEFANKSVSATTERYMRTYAENMPQSRALYPDCHHWQEEVRKLTQQRDSLTNSIRQIMGEGLESLSMKELKHIQVQLEKSISC

SEQ ID NO: 981 - protein, 119 aa, Pinus radiata
YTAEQVEALERLYNDCPKPSSLRRQQLIRECPILSHIEPKQIKVWFQNRRCREKQRKEASRLQTVNRKLTAMNKLLMEENDRLQKQVSQLVYENGYFRQQIQTVSITTTDTSCESVVTS

SEQ ID NO: 982 - protein, 85 aa, Pinus radiata
KHEFDVRYQKLEDKLYIAQLYFPLIGLILDEMPVFYNLSTVEKREVLICIMQIIRNLDDPSLIKAWQQSIARTRLFFKLLEECLV

SEQ ID NO: 983 - protein, 96 aa, Pinus radiata
GLLVTMRLFAATEPKRVFAVTKRIFLLGFVSFFLREGLVASVWLPVSPQRLFDFLRDERLRSKWDILSNGGPMQEMAHIPKGQDPRNCVSLLRASI

SEQ ID NO: 984 - protein, 109 aa, Pinus radiata
LVSLYNNHLNGILADEMGLGKTVQVISLICYLMEQKNDRGPFLVVVPSSVLSGWLSEISFWAPSISKIAYTGSPDDRRRLFRENISQQKFNVLLTTYEYLMNKRSTKTE

SEQ ID NO: 985 - protein, 52 aa, Pinus radiata
PKDADKHMLARQAGLTRSQVSNWFINARVRLWKPMVEEIYMEEIKEAELGHS

SEQ ID NO: 986 - protein, 101 aa, Pinus radiata
QQDDDAKVYESPLRRKNAEAPRTRWRFLPLESALENPYQGLMKHCTSLLKTLMNHKFGYVFNEPVDPVALGVPDYFTVITSPMDLGTIKAKLQDSVYSSPL

SEQ ID NO: 987 - protein, 230 aa, Pinus radiata
CTGVAARACGFAGLEPSKVADILKDRPAWLHDCRRLDVLTAFPTGKGGAVELLYTQMYAPTTLAPARDLLTLRYTSLLEDGSLVVCERSLTGTQSGPNMPPVQHFVRAQMLPSGYLIRPCEGGGCIIHIVDHMDLEPWSVPEVIRPLYESSAVLAQKMTITALRHLRQVAQEVSGEVVLGWGRQPAALRAFSQRLCRGFNDAVNGFADDGWSLLGSDGVEDVIIAINSSP

SEQ ID NO: 988 - protein, 164 aa, Pinus radiata
QYLRQQLQLLHARAGNNTRSLQQMAVTANDTSSDSVVTSGQRQQHSPQHPPYSVSTSRLFFIAEETLTEFLAKATGTAVDWIQMPGMKPGPDSIGVVAVAHACGGVAVQAWGVVSLEPSEVAEALRDKVSWLCDCRKMEVLGTFDSTDGRKLELLHTQMYAPIT

SEQ ID NO: 989 - protein, 107 aa, Pinus radiata
MGKTKMEMKHIQNPSRRQVTFSKRKNGLLKKAFELSVLCDAEVALIIFSETGKISEFASHNDMATILEKYRIYTQTETDGNMGASSVQSVKGWFPNFLEIAGFSVCG

SEQ ID NO: 990 - protein, 68 aa, Pinus radiata
MGRGPVQLRRIENKINRQVTFSKRRNGLIKKASELSILCDAEVALIVFSNKGKLYEFSSSSMTKILER

SEQ ID NO: 991 - protein, 230 aa, Pinus radiata
LSLSPQQLSNIQLSCFQNQPTDSEVNCPSISEATSQENLNRSDRLTSKLSGSLSSFRASSRDGMLGTKFLGSVNGPECNKPMHHGTNAIGAAELSNTLTGSKYFKAAQQLLDEVVNVGKGIKSDSVNHQKSQTWFGAISDKKNIATEATTNDRTTSAITGASISAEVMKNEHAFGLTPADRQELQMKKAKLVAMLDEVDRRYRQYYHQMQIVVSSFETAAGFGAAKTYTS

SEQ ID NO: 992 - protein, 76 aa, Pinus radiata
MGRGKIELKKIESTSNRQVTFSKRRMGLLKKAQELSVLCDAEVGVIIFSNTGRLYDFSSSSMEKMIETYYRFIEKN

SEQ ID NO: 993 - protein, 77 aa, Pinus radiata
VTLFLVLQVLDRGEKIELLVDKTENLRFQAQDFQKQGTQLRRKMWFQNMKVKLVVLGIVFVLILIIWLSICHGFKCH

SEQ ID NO: 994 - protein, 110 aa, Pinus radiata
PNSRSDGNGKADRSDSMGTEARTRTRFWRRRGRVRRLKYTWKSAGHPSIKKRIADSKDQPCRQFTPCDCQSMCGKQCPCLRSGTCCEKYCGCSKGCKNRFRGCHCAKSQC

SEQ ID NO: 995 - protein, 293 aa, Pinus radiata
ASQFSGNDMRNYGAKEVTSGLATGGQRPPALQLNLAALDSSGDGAAAKEKRTPKVNPYYLNSEFVMGKDKMPPPPPDNKKGGMKRTAQGKSEIRETKRPVADPMNGKILQDVMKQCGFLLSRLIKHKHGWVFKAPVDTVALGLHDYNTIIKQPMDLGTAKAKLNANEYKSPQEFAGDIRLTFNNAMTYNPNGHEVHIMAEQMLQFFEDRWKPICDRYEEEKRKLSWSVNDGLLPGASQNMKNFPFGETPKKNLKKTEPLLGLSPRPPPNAKSKANQTLRAPAPKKPKAKDLHK

SEQ ID NO: 996 - protein, 144 aa, Pinus radiata
KFDICVTSFEMAIKEKTALKRFSWRYIIIDEAHRIKNENSLLAKTMRIYSTNYRLLITGTPLQNNLHELWSLLNFLLPEIFSSAETFDDWFQISADNDQQEVVQQLHKVLRPFLLRRLKSDVEKGLPPKKETILKVGMSQMQKQ

SEQ ID NO: 997 - protein, 81 aa, Pinus radiata
MGRGKIETKKIENSVRRQVTFWKRRGGLMKKAFELSVLCDAEVALIVFSGRGKLYELETSHSNRNKYAPYSTSTTHQCRWF

SEQ ID NO: 998 - protein, 114 aa, Pinus radiata
YYLIVIDAKVIQAGLFNNTSTAQDRREMLEEIMRRGTNSLGTDVPSEREINRLAARSDEEFWLFEKMDEERRQKEGYRSRLMEEHEVPDWVFSVPTGKNDKGVENMDSNLGFDQ

SEQ ID NO: 999 - protein, 183 aa, Pinus radiata
ADSPHFNEADAIKSKILAHPQYPNLLGAYIDCQKIGAPPEVAARLDALSHEYENQQHRSSLSIGMDPELDQFMEAYCEMLTKYHEELTKPFKEAMSFLKKIEAQLNSLGKGTIRISPSAENDEKTEGGASSEEVEDGSGGETDFQEVDHHAVEDRELKDHLLRKYSGYLSSLKQEFMKKKKKK

SEQ ID NO: 1000 - protein, 122 aa, Pinus radiata
CKNVFTRLQGPVKEGRHTALFMEIPKRNENPTYYRLIENPIDARTIEQRLDRFSYGSVLDFAADVQLMLENAIRFYGHSSEVKANARRLQALFFQRMADSFPDDNFSSFKTRSLVALGQSAN

SEQ ID NO: 1001 - protein, 115 aa, Pinus radiata
LVNSGMAFGAKRWIATLQRQCERLASVLASNIPSRDLGVIPSPEGRKSILKLAERMVTSFCAGVSASTAHTWTTLSGSGAEDVRVMTRKSVDDPGRPPGIILSAATSLWLPVPPK

SEQ ID NO: 1002 - protein, 130 aa, Pinus radiata
LESQFDQSFEYPPVEQLVKQCGKFGLLERLLKHLKAQKHKMLIFSQWTKVLDLLEYYLSERGYEVCRIDGSVKLEDRKNQIRDFNDPDSNFCIFLLSTRAGGLGINLTDADTCFIYDSDWNPQMDMQAMD

SEQ ID NO: 1003 - protein, 276 aa, Pinus radiata
VKLGTTNTWLSRAVSGQHRAQQQQQQHYAERSVEEGRKWCGCAAGSRDCIHSNFLKLQNPASAGSSSAAANALSGRWLMPGPLLNDKIEGREGVELLGGEIPGESIMALSAQFKTAGSAAPERGLLNLHSADAVNSNGEPVDSGGAGGDRDGGEEAEDHAALWQSARIKADIVSHPLYDQLLSAHLECLRIATPKDQHSMIDAQLEQSQHVVTKYSVLGNDNFLVGDKKELDQFMTQYVLLLCSFKEQLQYHVHVHVMEAVRACIDLQHSLLTLTG

SEQ ID NO: 1004 - protein, 123 aa, Pinus radiata
SCAVQSQPAASGTRWNPTPDQIRILEMFYKGGMRTPNAEQIEHITAQLRQYGKIEGKNVFYWFQNHKARERQKQKRNSSMHQVAATAAKKTPTTIMADNPNELHKPNSNGTYSLYNLPFTAMS

SEQ ID NO: 1005 - protein, 90 aa, Pinus radiata
MGKTKMEIKRIQNPSRRQVTFSKRKNGLLKKAFELSVLCDAEVALIIFSETGKICEFASHDDMATILEKYRIYTETDGNMESSSVQSVKV

SEQ ID NO: 1006 - protein, 123 aa, Pinus radiata
MSVFETGNERKRPAGNSYSALELSDDIGDEDGSDDCIHLGEKKRRLTLEQVRALEKNFEMANKLEPEKKMQLAKALGLQPRQIAVWFQNRRARWKTKQLEKDFNILKHDYDSLKQNYDNLMEE

SEQ ID NO: 1007 - protein, 114 aa, Pinus radiata
MGKTKMEMKHIQNPSRRQVTFSKRKNGLLKKAFELSVLCDAEVALIIFSETGKISEFASHNDMATILEKYRIYTQTETDGNMGASSVQSVKVGESQLKALHERMDNLKKKERNM

SEQ ID NO: 1008 - protein, 90 aa, Pinus radiata
MASNGIMFNASNRNLIVMVNEAPSFEANSSLDGVMKNVSKRPFYNTLDADEAGDEDLLDECVHQPGKKRRLSVEQVRFLEKSFELDNKLE

SEQ ID NO: 1009 - protein, 107 aa, Pinus radiata
LERSIRQQRAFHHLGLMEQHPWRPQRGLPERSVSVLRAWLFEHFLHPYPTDADKHILAKQTGLTRSQVSNWFINARVRLWKPMVEEMYMEELKEEKVDQGTHNSEAE

SEQ ID NO: 1010 - protein, 126 aa, Pinus radiata
MNLNDHTYNLSPMANSGNPEEQIDEDAVDDFMNYQPESKKRRLTVEQVRSLERSFEIETKLEPEKKIQLAQELGLQPRQVAIWFQNRRARWKTKQLERDYSVLKASYDALKSDFERLQQENKNIRA

SEQ ID NO: 1011 - protein, 96 aa, Pinus radiata
MFTISTCTTHAQSLIYSFVARGTVVLAEYTEFKGNFTGIAAQCLQKLPASNNKFTYNCDNHTFNYLDEDGFAYCVVADESVGRQVPMAFLERVKED

SEQ ID NO: 1012 - protein, 110 aa, Pinus radiata
GCPGNIHDDDEEEDEEECSGTGQQTRKKRRLSLQQVRSLEKTFEVENKLEPERKLQLAQELGLQPRQVAVWFQNRRARWKTKQLERDYGQLKLNFECLKSNFDAIKQENQ

SEQ ID NO: 1013 - protein, 108 aa, Pinus radiata
MAGEKRKINRIANASARQVTFAKRRRGLFKKAQELSILCEADVALLVFSSTGKLYQYSSSSMKMILDQYILYSRSIQKDGKPNLEESHDIQKIKQQIKDISQNLRKLR

SEQ ID NO: 1014 - protein, 177 aa, Pinus radiata
MGMDMEDCNTGLGLGMSIGLGMNLMREDLQSHRHHVNGPPVQLDLLPLAPVLPSRDLPWGKTSPGTDGERSAGESKATVPRRIDVNKLPASCYYNEDTGTINVSSPNSALSSFHVDSGGAINAESSCYGMSVKREREATEELEAERACSRVSDEEADQEGGTRKKLRLSKEQSALLE

SEQ ID NO: 1015 - protein, 61 aa, Pinus radiata
MGKKLELKRIQNPNSSRDSFSKCKRGLLKKSVKLFVLCDAEVSLIILSETAKIYEFASNKS

SEQ ID NO: 1016 - protein, 51 aa, Pinus radiata
RFQAQDFQKQGTQLRRKMWFQNMKVKLVVLGIVFVLILIIWLSICHGFKCH

SEQ ID NO: 1017 - protein, 68 aa, Pinus radiata
MGQQSLIYSFVARGTVVLAEYTQFTGNFTTIANQCLQKIPASNNKFTYNCDRHTFNYLVEDGSHTVLL

SEQ ID NO: 1018 - protein, 155 aa, Pinus radiata
MDREKLMKMAGAVRTGGKGTMRRKKKTIHKTATADDKRLQSTLKRIGVNNIPAIEEVNIFKDDHVIHFANPKVQASIAANTWVVSGSSQTKKLQDLFPGIINQLGPESFANLRKIADQFRRPEPNPAQGEDDDDDDVPELVEGETFEEAAKKDSS

SEQ ID NO: 1019 - protein, 249 aa, Pinus radiata
MMQPAVGVAPPPPVAAPAMDPQQQQQQWMMMQQQMQPQQAQPQPPPQAGFWPPQHQPQPQHAQSQLMAQQYPQQPTSADEIRTLWVGDLQYWMDETYLHGCFGNSQEVVSVKIIRNKQTGQSEGYGFVEFASHAGAERALQTYNGAQMPNTEQFYRINWATFGIGEKRPEIGPDYPIFVGDLASDVTDYLLQETFRTRYQTVKGAKVVTDRVTGRSKGYGFVRFGDENEQVRAMTEMNGVFCSSRPMRI

SEQ ID NO: 1020 - protein, 82 aa, Pinus radiata
ASFGLGERRLLTGPEHSIFVGDLAPDVTDYLLQETFRSRYTSVRGAKVVTDPSTGRSKGYGFVKFADENERNRAMTEMNGVY

SEQ ID NO: 1021 - protein, 107 aa, Pinus radiata
RQEPSLKKQIIETSEKAIVFSQWTSMLDLLEVPLKKSCIQYRRLDGTMSVIARDKAVNDFKTLPEVTVMIMSLKAASLGLNMVAASHVLLLDLWVESQQLKTKLLTG

SEQ ID NO: 1022 - protein, 99 aa, Pinus radiata
LGFEDYVEPLKIYLNKYRELEGEKSSMAAPPRQSDLQQHHHVNGSDPHPYGHSPHGPMAYHVPGGASFRAWKVTVACSFCYCKEVIEMEMGHGNGDCKV

SEQ ID NO: 1023 - protein, 158 aa, Pinus radiata
MENLPNQQPDLEIAQTHEDPGSRQFKGIRLRKWGRWVSEIRIPKSREKIWLGSYTTPEQAARAYDAAVYCLKGPNAKFNFPETVHDIPSVTSVSRQEIQHAALKYALGQPPPSLQSLEGHAALKYALGQPPPSLQSLEGHAALKYALGQPPPSLQSLQ

SEQ ID NO: 1024 - protein, 197 aa, Pinus radiata
MAFTGTQQKCKACDKTVYFVDQLSADGVSYHKACFRCNHCKGTLKLSNYSSMEGVLYCKPHFDQLFRESGNFNKNFQSQRSSKAIDGLSPEMTRSPSKVSMMFSGTQDKCATCGKTAYPLEKVTVENLSYHKSCFRCSHGGCSISPSNYAALEGILYCKHHFSQLFKEKGSYNHLIKTASMKRAAAVPEVASAVPEI

SEQ ID NO: 1025 - protein, 232 aa, Pinus radiata
KPAGTSRLPEFKSRTITLPSFNIPSSNPRKLLDMVKPSQKQNIHVNGKPESRSLMSRQFKGIRLRKWGKWVSEIRMPNCRAKIWLGSYESPEKAARAYDFAAYCLRGSKARFNFPDSPPEIPCASSLSPSQIQAGAARFAAEEFQMPSDDDTASSSCGSEAESDLPPEIPCASSVSPPPIQAAAPRFAAEEFRLPSDEDTASSSCGSVTESNIDSQQISAEQGSAFWDSLFL

SEQ ID NO: 1026 - protein, 88 aa, Pinus radiata
HQWHRFCSRRLCCTALHNTQKQCTKSAATGKGGIKRIRRQQEAAPSPPEEATLNQQTPPYRGVRRRNWGKWVSEIREPKKKTRIWLGS

SEQ ID NO: 1027 - protein, 501 aa, Pinus radiata
MCGGAIISDFIIPPASRGRRVTARDIWPDFDKFSEFINGGAAVESFDVSVDVDDDEEDSDDDEFLDFEESYQNKKKKQQQPISPTKGFELPLARGLDGPAAKSAVRKRKNLYRGIRQRPWGKWAAEIRDPRKGARVWLGTFNTAEEAARAYDAAARKIRGKKAKVNFVDEPPPSVKKESNNAKGSKKGSSKKIKSYTTPKADFFEGFKTANPSIAQYNFHQKFPNPSCDDLGYQNPLSPLHAICNRNFAAKQSSSALPAYSTEFSDFDDSEVDNLVPQPASFEPMKNINKRKGYNSFESDTSSVSADRSHISWVTEVKTPEISSVPKAEADSDHYDFADMSTPVATSVSAGSPEVQLPPFNNGLNKSPSVEDGVAAEKSPKLEESSQLEISEDLPSLESYPWLFQMPYFEGLDQSLQGVGIGDASFPDGENDLQLWSFDAVPISDSAYISLESLACKQLVIMESRRLVMASFCRPSSNRELVIFPLFFFIQFDGATVISAH

SEQ ID NO: 1028 - protein, 134 aa, Pinus radiata
MAFAGTQQKCKACEKTVYVVDQLTADGSVFHKACFRCHHCNGTLKLSNYSSFEGVLYCKPHFDQLFKRTGSLDKSFEGTPKAVKNEKLNDGEIKTPNRVSALFSGTQEKCLACGNTVYPIEKVSVEGVGYHKAC

SEQ ID NO: 1029 - protein, 76 aa, Pinus radiata
MDGSQNSGGNAVPPFLTKTYDMVDDSSTDSIVSWSPGNNSFIVWNPPEFARDLLPKYFKHNNFSSFVRQLNTYGFR

SEQ ID NO: 1030 - protein, 97 aa, Pinus radiata
HEKKAVLWNMDTLKAKGSLEEHSFLITDVRFSPNSTRLATSSFDRTVKVWDADNPNYTLRTFSGHTGSVMSLDFHPNNEDLICSCDGESEVRYWSVN

SEQ ID NO: 1031 - protein, 117 aa, Pinus radiata
MGYLQELEDQIIGLQNLVKRNERLYGSGNTPSGGVALPFILVQTRPQATVEIEISEDMQLVHFDFNSTPFELHDDAYVLKAMGFCEKPFTDGMDVTGHDSFANGTGFGENNMTITNM

SEQ ID NO: 1032 - protein, 146 aa, Pinus radiata
TRVLLIDDHPLFREGLAGAIQAEPDFEVVGQAGTVDELRGLAPQIEPDVAIVDLLMPSVSGIGVTRELCELLPRCRVLGLSAVVDAAAIAEMLRAGASGFALKTQPAPDILDAVRRTVAGESYLPPSVSREAIDAELAGGAPPSLA

SEQ ID NO: 1033 - protein, 181 aa, Pinus radiata
MSILPKSDSIHIREVWADNLEEEFNLIREIVDDYPLIAMDTEFPGIVVRPVGKFRTVQEYNYETLRSNVDVLKLIQLGLTFSDEDGNLPNCGTDRYCVWQFNFREFNIWEDAYASDSIELLRQSGIDFKKNSERGVDSHLFAELLMSSGIVLNENVRWITFHSGYDFGYLLKLVMNRSLPP

SEQ ID NO: 1034 - protein, 122 aa, Pinus radiata
EHACPMACHPGPCPPCLVSVSKSCWCGSKTLVSRCSVLNKGTSTNAGVGPVLSCGQPCGRLLGCEKHTCEQECHPGPCPPCDIVDVAKCYCGRQERGMACGTGIVETCVVEGEGSWEGRWQC

SEQ ID NO: 1035 - protein, 158 aa, Pinus radiata
MRINEATPKKSLGFQQPYSMKGNYYTQAYGGAVASQAFQSDNDPNNTTIFVGGLDPNATDEDLRQVFGPYGEIVYVKIPVGKGCGFVQFTNRSSAEEALQKLHGTVIGQQSIRLSWGRSPANKQTASWGVQPQADPNQWNGGGAYYGYGQGYEAYGYA

SEQ ID NO: 1036 - protein, 126 aa, Pinus radiata
QYLSPGKSAPFWLCQDMAITSQQHHMNALPYNERSEKRPKFKGIRMRKWGSWGSEIRMPKTRTKIWLGSYETAEQAARAYDAALYCLRGPNAKFNFPDTVPSIPSAFSLSRHQIQLAAARYARDEL

SEQ ID NO: 1037 - protein, 79 aa, Pinus radiata
MEPMDIVGKSKDDVSLPKATMFKIIKEMLPPDVRVARDAQDLLVECCVEFINLISSESNEVCGREEKRTIAPEHVLRAL

SEQ ID NO: 1038 - protein, 132 aa, Pinus radiata
EISLFWLQSFCKLPNMENVPEQEPDNTISLPHEDRGSRQFKGIRLRKWGSWVSEIRMPRSRKKIWLGSYTTPEQAARAYDAAVYCLRGRNAEFNFSVPDIPTASPLSREQIQHAAAEYALGKAPSSFPSFAG

SEQ ID NO: 1039 - protein, 241 aa, Pinus radiata
MNEPDEHAAAQLVQKRSHPLAEVVMPISVRPLAEKCGVEAEEERKRAAEHKKQRSKNWTRAETLKLIRLRAEMEPRFARSGRKSELWEEIAEALRRESVVRDAQRCRDKWEKLTASYKEVRDGQRDRQDFPFFDELDPLLSLKPQKAAAAAAAAATAATAANFVSAETPSNFPTDDEMTEEGSPAGKRRKTTPRGLSATDLDAVRELLESLVSRQQRFFVDLLDSMERKEEIRERIRQEKE

SEQ ID NO: 1040 - protein, 182 aa, Pinus radiata
MVYIVLLDLCESVQPPQGSLQEFSNSIQEEQAMVDLMPKDSRQTMINNTTIFVGRLDPNATDEDLRQVFGQYGDLVSIKIPVGKGCGFVQFANRACAEEALQRLHGTVIRQQTIRLSWGRSPANKQNSQPQGQQPQSDPNQWNGAYYGQGYESYGYAPPPQDPAMYAYGGYPGYGNYNQQVS

SEQ ID NO: 1041 - protein, 66 aa, Pinus radiata
TSYHRPCFKCCHGGCVISPSNYVAHEGRLYCRHHSSQLFREKGNFSQLSKATPTKGVTENSDTDDK

SEQ ID NO: 1042 - protein, 152 aa, Pinus radiata
VGGGGGGKGSPYRGVRMRKWGKWVSEVREPNKRSRIWLGSYSTPEAAARAYDTAVFYLRGPSATLNFPEEARKEQQSDLRLSQLGELSPSSIQRRAAEVGAAVDHAMQAGPVPAQTLREINQENDMKNALSSKLSEGNNFKIEAKNNMRQQG

SEQ ID NO: 1043 - protein, 193 aa, Pinus radiata
MAFAGTTQKCKACEKTVYLVDQLTADNSVFHKSCFRCHHCNGTLKLSNYSSFEGVLYCKPHFDQLFKRTGSLDKSFEAIPRASRNDKMHENENRTPSRVSALFSGTQDKCVACGKTVYPIEKVAVDGTSYHRPCFKCCHGGCVISPSNYVAHEGRLYCRHHSSQLFREKGNFSQLSKATPTKGVTENSDTDDK

SEQ ID NO: 1044 - protein, 121 aa, Pinus radiata
MVKPLPKQSSPSGSENCQIKSRQFKGIRLRKWGKWVSEIRMPNSRAKIWLGSYDSPEKAARAYDFALYCLRGSKATFNFPDSPPEIPCASDLSPPQIQAAAARFATEDFRLPSEEDAASSS

SEQ ID NO: 1045 - protein, 131 aa, Pinus radiata
MEIRLQQENDQDIAPPHEDRVSRQFKGVRPRKWGIWVSEIRMPRSRQKIWLGSYKKPEQAARAYDAAVYCLRGSNAKFNFPNSVPDIPSASSLSRQQIQLAAAKYALDQSPSSPPSLNNNKEEPASPSQSS

SEQ ID NO: 1046 - protein, 102 aa, Pinus radiata
MTQQTTSPTVSPAALALPTSASSTSAKSAAVPVPAQANPRKRPRSDLSAEEKREARAHRNRIAAQNSRDKRKQQFTSLEQRVIDLENENRQLRDALATSQPN

SEQ ID NO: 1047 - protein, 66 aa, Pinus radiata
LLTIFEAVYVHKGIVNAAKVLNLTPSAISQSIQKLRVIFPDPLFIRKGQGVTPTAFAMHLHEYISQ

SEQ ID NO: 1048 - protein, 106 aa, Pinus radiata
MKGPQGISNAQNTCTKFRMPTSENLIPIRLDIEIDGLRLKDAFTWNVNDPDSEIHLFARRTIKDLKYPGSFITPVVQSIQAQLAEFRSFEGQEMNTGQKVLPLKLP

SEQ ID NO: 1049 - protein, 134 aa, Pinus radiata
MEGSQNGSSNAPPPFLTKTYDMVDDPATNAMVSWSPGSNSFIVWNPTEFSRVLLPTYFKHSNFSSFVRQLNTYGFHKIDPERWEFANEGFLRGHRHLLKNIHRRKPVHSHSQQKGESLSGGSCVEIKQLEDETE

SEQ ID NO: 1050 - protein, 220 aa, Pinus radiata
MVLYELLHVQQIQQIQQQQFQLQQQQIAAAASIHHMGRNPLGPRDQPMKLHGSSLSKPAKLYRGVRQRHWGKWVAEIRLPRNRTRLWLGTFDTAEEAAMAYDKAAYRLRGDYARLNFPHLKHHLEANSFAPWTGNSVLPSSVDAKLQAICQSLKQPLESMSKTEESEEISCAYENSGSLGSVRDEDAKKNDVVSVKSETCDSDSSDDSTITALNSSGDQN

SEQ ID NO: 1051 - protein, 219 aa, Pinus radiata
RIEAPGRRTNPAAVTWAAAHFSVKEQDRFLPIANVGRIMKKALPANGKVSKDAKETVQECVSEFISFITGEASDKCQREKRKTINGDDLLWAMTTLGFEDYVEPLKIYLHKYREMEGEKVSMAKQGDPTPSKEGNNAINGSSIENPNANAYSGLNPGGYNRVQSQSLPHMQQAAYGQPPGGMVYGHHGHIMGAYNMTAPNSSGGNSSGQQQQQAPRGQW

SEQ ID NO: 1052 - protein, 100 aa, Pinus radiata
GCTTVVETLAKWQELNSQVESSKDGAKRLRKAPAKGSKKGCMKGKGGPDNGRCNYRGVRQRTWGKWVAEIREPNRGSRLWLGTFSSAEEAARAYDQAARV

SEQ ID NO: 1053 - protein, 117 aa, Pinus radiata
MEIVGKAKEDVSLPKATMTKIIKEMLPAHVRVTRDAQDLLVECCVEFINLISSESNDICYKEEKRTIAPEHVLESLKILGFGSYIREVKAAYEQHRIENWDCPRAGTRWSKNRLEMT

SEQ ID NO: 1054 - protein, 161 aa, Pinus radiata
NINGVAGGVAKEKKVNFPWCALEKQVGTSSFDPNLASSKQAMDSLIMQQLPTFLQYCKDLEEGRQSWFMHKKEATWRLSRLEQQLESEKARKRREKIEEVGSKIRALREEEITYLDKLETECREQLSSLQRDAEMKEAKMMELWATKHLQLTKFVDSALSV

SEQ ID NO: 1055 - protein, 396 aa, Pinus radiata
MARETNSFALLGGDDDQGDDDLMALINSAATLKPEKKPKTTAKKNGQQQPPPPQSQPAKLPSKPLPPAEAVRADRGRGRGGRGRGGGRGSRFEGGEYNTESNGYGGGGGFGGGRGWGRDEDSGNRGWGREEDTGGRGWGRSNGEEDTGGRGWSRSNGEDDAAAGGGQSRGRGRGRGRGRGFGGRGSGRFGGGGDSYGYDANGQDRPPRQQFEDTNTFTGTDNWDTPEVSVVDEAKNVEPEQKKPEEEATPGVTSENKDNKEEEDNEMTLDEYEKLLNEKRKTLEALKNAERKVILDRDFEKMQLVDKKNDGIFIKLNSEKERQRKKETLEKEERARKSVSINEFLKPADGERYFTPSGTRGRGRGRGRGRGDGVSTRGGFGGRYSDADQVAAPCIE

SEQ ID NO: 1056 - protein, 120 aa, Pinus radiata
TWAQEEEKSPRAIGGEKGGRGLRQFSMKVCQKVESKGRTTYNEVADELVAEYANPNSALISPDQQQYDEKNIRRRVYDALNVLMAMDIISKDKKEIQWKGLPSTSPNDLEDLKAKRMGLR

SEQ ID NO: 1057 - protein, 78 aa, Pinus radiata
PMKLYRGVRQRHWGKWVAEIRLPRNRTRLWLGTFDTAEDAALAYDHEAYKLRGENARLNFPHLFLNKGSTSPKACSVA

SEQ ID NO: 1058 - protein, 171 aa, Pinus radiata
SFSCRIRHQTEPTLILIDTAGCDMEEKKDDEDSTMNEGEATVTLMHAKKLLESGVNPSDIGIITPYAAQVGLLKIMRSKEMKLKDLEISTVDGFQGREKEAIVISMVRSNAKHEVGFLNDRRRMNVAVTRARRQCCIICDTETVSSDKFLKRLVEYFEEHAEYLSASEYLT

SEQ ID NO: 1059 - protein, 94 aa, Pinus radiata
EKCSDQVSGSTSSCRIRHELGYSRSAKRCKEKWENINKYFRKAKESNKKRPENAKTCPYFHQLDALYKKRNLGNRHNKIMVLSIFSVASTGLFM

SEQ ID NO: 1060 - protein, 174 aa, Pinus radiata
MAPSNNRRDDNGARGVHFRGVRKRPWGRYAAEIRDPWKKVRLWLGTFDTAEEAARAYDTAAISLRGPKAKTNFAYSSPSSSSSLHNNQSSSQNSSTVESWPSAAPVTRSGDLELPASFLPRLGVSTGRRVLNGGNPRSGRRRSLSEKNSGRKAEGAEARTTLSDSDSSSSAVLD

SEQ ID NO: 1061 - protein, 121 aa, Pinus radiata
MGPLMGSPLGGGLGLSPRMGGGIGNGLQGGLGVGLAGLGATALTIGAASPANQLSSDGMGNSHGDNSTVSPIPYGLDVSVRGRKRGGPVEKVVERRQRRMIKNRESAARSRARKQAYTVNW

SEQ ID NO: 1062 - protein, 145 aa, Pinus radiata
ETRGGSSGDFLPPPPTTKCSEELQNKITKYIALKSAGRSFNKELRNSKGYRNPDFLQRAVKYQGIDQIGSCFKKEIFDPHGYDPSDYYDALALELKREFERREQEKQKNQRVDFVHGAVQTTSVQSVSKPIVQVMGGQKVPVVGV

SEQ ID NO: 1063 - protein, 236 aa, Pinus radiata
MSSPQSNKWLSYFDEPLLDDVGVGQPANPFFWCGQGINDQPDVSVEIDGPNKDMDEQDKLCPRKRSREESSGGPGSKACREKMRRDRLNDRFMELSSVLEPGRPPKTADKATILSDAARVMTQLRTEAQNLKAENERLQEAIKDLKAEKNELRDEKLRMKAEKEKLDQQVKAMALPTGFVPHPAAFHAAAAFAAQSQAAANKTMPVPGYPGMAMWQWMPPAVVDTSQDHVLRPPVA

SEQ ID NO: 1064 - protein, 145 aa, Pinus radiata
MGSRTMLSSNGGRTPQFQPLVRQNSLYNLTLEEVQNQLGDASKPLSSMNMDELLKNIWTQEESQAISMAIGNGPMNGVPPNSAPASGGLQRQGSLTIPRTLSRKTVDEVWRDIQQSQGKSNEEKKPQQRQSTFGEMTLEDFLVKA

SEQ ID NO: 1065 - protein, 171 aa, Pinus radiata
MASGNVDPDQWEFANEDFLRGQRNLLKNIHRRKPMHSHSQNPQQGVCNDAIKYELEEEIQRLKRDKGLLMMELVRIRQQHQGTEMHMQTLEERLQAMEHRQQQMMAFLAKAVQKPGFVAQLVQQSENNKLLEAANKKRRLPKQENCSEAGETELTDSQIVKYQPASGDECS

SEQ ID NO: 1066 - protein, 112 aa, Pinus radiata
VAAASASASGTAVAASLPVNGAAGVRSSVDSEHSDIEASFKEAECSQAIVERRPRKRGRKPANGREEPLNHVEAERQRREKLNQRFYALRAVVPNVSKMDKASLLGDAISYI

SEQ ID NO: 1067 - protein, 73 aa, Pinus radiata
LYAEESSTVTHLQYQQSILENDLRSKLKDNLQQPQNSGKKRRYRGVRQRPWGKWAAEIRDPKKAARVWLGTFD

SEQ ID NO: 1068 - protein, 203 aa, Pinus radiata
NMAKHTVCASFLNEGDFICPPYEDGIGLEWLSDFVEDSFAATGSSNSGSLADLSKDKIDDNREKKKQNPTDEAIIPEIPPIKETPRSQRAVPGRARSKRRRSSGAPIRGWSTSEDYALQNEGGMKTVTGADAINHYQSSAPQQQPRRCTHCLSQRTPQWRLGPLGPKTLCNACGVRFKSGRLFPEYRPAKSPTFIRYIHSNSH

SEQ ID NO: 1069 - protein, 190 aa, Pinus radiata
GNAARRPHDVLLKLEKLSSQTTLESLQRLIVQKKCLLFGKKVGIRIDGKKTANTEKVNERNTIPRIIFGALTFTRNRPHALSKNGSIADTRRNICGAPQEDGTICTAIPLKSRKRCPDHKGQKGQKEKNLSKINISANVESRNQGVGEHENEYRYCGVLLKDGSTCKIIPDKGRKRCNIHKGMRIPGQAK

SEQ ID NO: 1070 - protein, 81 aa, Pinus radiata
MATSNPFDLLGDDDNGDVSQLVFVPQEKPTVKKASQPAQTATAKLPSKPLPPAQAVRESRNGVGRGGRGGRGGDRNQDVGY

SEQ ID NO: 1071 - protein, 154 aa, Pinus radiata
MNREKLMKMAGAVRTGGKGTMRRKKKTIHRTTTTDDKKLQSTLKRIGVNAIPAIEEVNIFLEDSVIHFQNPKVQASIAANTWVVSGSPQTKRLQDLLPGIINQLGPDSFANLRKLAQQFQKEVPHPAVEEDDDDVPELVEGETFEEAAKQESAA

SEQ ID NO: 1072 - protein, 63 aa, Pinus radiata
MPHQHQHQERFPSQEGISWKRDDELPQPQNPPKKKRYRGVRQRPWGKWAAEIRDPKKAARVWL

SEQ ID NO: 1073 - protein, 331 aa, Pinus radiata
MGQIGGPHGYPNSSPSAQDALYEELWHACAGPLVTLPRIGERVFYFPQGHMEQVEASTNQGADQHMPLFNLPYKILCRVINVQLKAEPDTDEVFSQITLLPEAEQDESSVEKEPLTPLPPKPLVYSFCKTLTASDTSTHGGFSVLRRHADECLPPLDMSQQPPSQDLVAKDLHGVEWRFRHIFRGQPRRHLLTTGWSVFVSSKRLVAGDAFIFLRGENGELRVGVRRAMRQQNNVPSSVISSHSMHLGVIATASHAVTTKTMFSVYYKPRTSPSEFIIPYDQYMESMKINFSVGMRFKMKFEGEEVPEQRFTGTIVGISDADPVNWPNSKW

SEQ ID NO: 1074 - protein, 113 aa, Pinus radiata
MTQATNYTAGTIRDDQEEQCVRRGPWTVDEDMSLIRCVTTRGEGRWNTVAKFAGLKRTGKSCRLRWLNYLRPDVKRGNITPEEQLLILELHRLWGNRWSKIARQLPGRTDNEI

SEQ ID NO: 1075 - protein, 44 aa, Pinus radiata
MAENYGSPDSSPRSENESGGGHMGGSDFSVKEQDRFLPIANVGR

SEQ ID NO: 1076 - protein, 282 aa, Pinus radiata
MPMLAETYRDSFETTSGGSSVDLVGMALPGLAPNLSSASVSASASEDSAKKIRKPYTITKSRESWSEQEHDKFLEALQLFDRDWKKIEAFVGSKTVIQIRSHAQKYFLKVQKNGTREHVPPPRPKRKASHPYPQKASKNVPVSQQVSTAFPTAATQLDSGYYPRAESSSILTKSGSSCPTVSSWVHHTIPSIDASFVEKDDGGPPGIETGNNCSSGSTESSPPTWPPCSEIPEKVKPDFSQVYKFIGSVFDPSTTDHLKKLKEWIQLILKLCCTHEEPFHNL

SEQ ID NO: 1077 - protein, 104 aa, Pinus radiata
MGRSFSCWSCSKDNGHERLNRGSWSAEEDTILSEHIKTHGVGRWTSLPKKAGLKRSGKSCRLRWFNYLRSDIKHGNISPEEEELLIRLHRLLGNRWSLIAGRLP

SEQ ID NO: 1078 - protein, 93 aa, Pinus radiata
MDRDKLMKMAGAVRTGGKGTVRRKKKAVHRATTTDDKRLQSTLKRLGVNTIPAIEEVNIFKDEMVIHFINPKVQASINANTWVVSGSPQTKNL

SEQ ID NO: 1079 - protein, 118 aa, Pinus radiata
MDRDKLMKMAGAVRTGGKGTVRRKKKAVHRATTTDDKRLQSTLKRLGVNTIPAIEEVNIFKDEMVIHFINPKVQASINANTWVVSGSPQTKNLQDLLPGIINQLGPDNLINLKKIAQQ

SEQ ID NO: 1080 - protein, 191 aa, Pinus radiata
DDEEEASLKGKVRWGLDSIAALGLKFIKRALAKKKTVGIAGGADRVLLSGRMKLKPKGLMCVFCGLLRVRGNGIIGVKVFLEKYAGSSQQEILRVEISLSFAFQNEDRLLPAASGRGKEESQFRAMACMCWATCVPTCCWEPCCIFSSRSQAGGCLNKQEVDAHIPNYPNLPPQLICHYTMLLCRQMWRQM

SEQ ID NO: 1081 - protein, 86 aa, Pinus radiata
IDSSEKRLKGKNYIDITTERAAQEPGCIMARPQRYRGVRQRHWGSWVSEIRHPLLKTRIWLGTFETAEDAARAYDEAARMMCGPRA

SEQ ID NO: 1082 - protein, 119 aa, Pinus radiata
MVRSPCCDKVHTNNKGAWTKEEDERLIAHIEAHGEGSWRSLPKAAGLLRCGKSCRLRWINYLRPDLKRGSFSEEEDDLIIKLHSLLGNKWSLIAGRLQGERTTKIKNYWNTHMKRKLLS

SEQ ID NO: 1083 - protein, 128 aa, Pinus radiata
MGRSPCPPKEALNRGAWTGMEDTILTEYIRVHGSGGWKDISKRAGLKRCAKSCRLRWLNYLRPDIKRGNISPEEEELIIRLHRLLGNRWSLIAGRLPGRTDNEIKNYWNTHMSKKPWLSMDESQSNTS

SEQ ID NO: 1084 - protein, 126 aa, Pinus radiata
EEEDEEEAGKELEAWERAYADERSWETLQEDEEGLLNFDKKQQQQQQRQYRRRLQSAAAAASNIQRGLIRYLYIIIDFSRAAAEKDFKPNRMVVVANCVEAFVREFFDQNPLSQLGIVIIKNGVAH

SEQ ID NO: 1085 - protein, 139 aa, Pinus radiata
RAPCCEKTHTNKGAWSKDEDEALVAYIQAHGEGSWRSLPKAAGLQRCGKSCRLRWINYLRPDLKRGNFSPEEDEIIIKLHSMLGNKWSLIASKLPGRTDNEIKNYWNTHIKRKMLERGLDPSTHLPLMSDHGSFESSSK

SEQ ID NO: 1086 - protein, 189 aa, Pinus radiata
KVVPPLDFTQQPPAQELTARDLHDNEWKFRHIFRGQPKRHLLTTGWSVFVSAKRLAAGDSVLFIWNEKGQLLLGIRRANRPQAVMPSLVLSSDSMHIGLLAAAAHAAATNSRFTIFYNPRASPSEFVIPLAKYVKAVYHTRVSIGMRFRMLFETEESSVRRYMGTITGISDLDQVRWPNSHWRSVKVGW

SEQ ID NO: 1087 - protein, 132 aa, Pinus radiata
WEFANDCFRKGEKQLLCEIHRRKSVQQSSAAPASRCVSPVNSVEEQALSSTSSPVSSHAEAALVNCGQNSTSGLHGENEKLRKDNLLLMSELAQMKKQCNDLLLFLSKCVNITPDNLSNILIAASQTNCRDE

SEQ ID NO: 1088 - protein, 214 aa, Pinus radiata
GKWGVPDNLYGAQEDSGGSSVKQKNLKDGDQFTSSDEADSEVNEFNIMKRSNSGVGYEDNKRSGGQGDGNQYRSRHSRSISMDSIMSKMHNFSEDLEQEPSQGRNVRHSHSNSMDGSTNFNVEFGNGEFSASEMKKIMASEKLAELATVDPKRVKRILANRQSAARSKERKMRYISELERKVQTLQTEATTLSAQLTLLQRDQLDWAVRTTSSS

SEQ ID NO: 1089 - protein, 97 aa, Pinus radiata
MADGHQFNNILLVGRGGTNPGQLRIHSGGIVWRRQGGGKVVDVAKNEVKSLSWTRVPRGYQLGVKLKAGLNIKLAGFREQDVGNLTNFMTNTIGLAP

SEQ ID NO: 1090 - protein, 108 aa, Pinus radiata
MGDHSGGESSPHSDIESTGIHNNGSSSSSQSIIREQDRLLPIANVGRIMKKTLPTNAKISKEAKEIMQECVSEFISFVTGEASDKCHKEKRKTINGDDILWAMTTLGF

SEQ ID NO: 1091 - protein, 90 aa, Pinus radiata
RNIQRNEYHNLFNFISSKGLKIMNLGDAHGTSGVAAVLENSDDEAVDPHLERIKSAREGGAGEDSDEEACYTGDLSLICAVVKELICTHD

SEQ ID NO: 1092 - protein, 133 aa, Pinus radiata
MGCVSSKVENEELVKRCRDRRRLMKQAVNSRHNFAAAHIAYLRALQNTGNALVQFAEGESSAMNGNAIEEAATPMPATPLTASHRHPMKFHPPPPPPPPPLVPSSPSVSPSMESFRMPSKHNPLSRSTSDISY

SEQ ID NO: 1093 - protein, 148 aa, Pinus radiata
MGRAPCCTKVGLNKGAWSAEEDSLLGRYIQTHGEGNWRSLPKKAGLRRCGKSCRLRWLNYLRPCIKRGNITTDEEELIIRMHALLGNRWSIIAGRVPGRTDNEIKNYWNTNLSKKLAVRGIDPKTHKKITTDGTNRVNGDRFSQRKGE

SEQ ID NO: 1094 - protein, 107 aa, Pinus radiata
RQLIRELEQMFNIEGELEDPSKGWQVVYTDNEGDMMLVGDDPWQEFCSIVRKIYIYTREEVEKMTPQTPSANSRDVQKSLSQEETSRSSDRQDSSIAGVTAERSSDA

SEQ ID NO: 1095 - protein, 275 aa, Pinus radiata
MSNGRLCEDLDRIKGPWSPEEDASLQRLVQKYGPRNWTLISKGIPGRSGKSCRLRWCNQLSPQVEHRPFTPSEDAAILQAHAQHGNKWATIARALPGRTDNAIKNHWNSTLRRRCRDPKKGIVVHLDDEISSLDAARKRSSDGFSHDGSSALEDNGCSSWEVDSKRLKRLGELGTEQGPEVEAEVEVSDRSDANPGRVLYRPVPVVSFFSSFGKTVANLQETAAGAVGVDPPTSLSLSLPGLDPAIPSPKLSTQKDSHNNSTVNNNIPIPPVVNT

SEQ ID NO: 1096 - protein, 128 aa, Pinus radiata
EFGRSSEKGRGYGRGRGRGGRGGYGNDAGDESQRPRRQYERRSGTGRGYEVKREGAGQGNWGTPTDQGFTEEPEELSRAEEEKTVTPEKQEEQKPSEESNQEIPAPESEEKKEEEEDKDMTLDEYEKV

SEQ ID NO: 1097 - protein, 135 aa, Pinus radiata
AVNSSLSVGMRFKMRFEGEESPERRFTGTIIGMGEVDNVRWPESKWRSLKVQWDETSVVPRPERVSPWEIETFVASSAALNPLPAPRTKKPRPNLVSSSQELMIHGSGKTATDSSQVHRLPRVLQGQEMRTFGGS

SEQ ID NO: 1098 - protein, 46 aa, Pinus radiata
AKSCRLRWLNYLRPDIKRGNISPEEEELIIRLHRLLGNRYVENRGT

SEQ ID NO: 1099 - protein, 113 aa, Pinus radiata
MGRSPCCSKEGLNRGAWTKREDMILSEYVRIHGDGGWRNLPEKAGLKRCGKSCRLRWLNYLRPDIKRGNICPAEEELIIRLHRLLGNRWSLIAGRLPGRTDNEIKNYWNTHLS

SEQ ID NO: 1100 - protein, 148 aa, Pinus radiata
PYLHESRHLHAMKRARGCGGRFLNTKKLEDSKANVDNGKTPEGHTAQAGSSSGSEVLQSENGNGNSTQELHGACGMSGSQVTSIAQSSENGTTYQYSHTNGAYLNHYQHPHFHISAFHPLSSGGEEGSSAKGGSIISGGSQQRVVVIQ

SEQ ID NO: 1101 - protein, 48 aa, Pinus radiata
MGRSPCPPKEALNRGAWTGMEDTILTEYIRVHGSGGWKAISKRAGECQ

SEQ ID NO: 1102 - protein, 191 aa, Pinus radiata
VTRPGKFRSCQDGYAVRASLKAEDGVLYPLEKSFFFLPKPPTLILHEEIEYLEFERHGAAGTSSMSSHYFDLIIKLKSEQEHQFRNIQRNEYHNLFSFINTKGLKIINLGATETIGGVAAALQNSDDEAVDPHLERIKIYVMVELVLKTATKRMKTLLQKTMMLDLQQMSQKKRDQMQVRVQRSSNLQRKK

SEQ ID NO: 1103 - protein, 106 aa, Pinus radiata
MSPPPSYSMFPNSGMGLNPSVTSSEPSSQVSGSIPHQYSGSEEDPKLTIDERKQKRMLSNRESARRSRMRKQQHLDELRARTAHLRAENSHMLTKFNIASQKYMQL

SEQ ID NO: 1104 - protein, 162 aa, Pinus radiata
RGQPRRHLLTTGWSVFVSAKRLVAGDAFIFLRGENSELRVGVRRVMRQQSNMPSSVISSHSMHLGVIATASHAVTTRTMFTVYYKPRTSQSEFIIPYDKYMEAVNSNLSVGMRFKMRFEGEEAPERRFTGTIIGIGDVDPSRWPSSKWRSLKVQWDETCAIP

SEQ ID NO: 1105 - protein, 115 aa, Pinus radiata
MAQSEEQPNEATVPRPADSHRSIPTPFLMKTYRLVDDPSLNDIISWNEDGTTFIVWRPAEFARDLLPNYFKHNNFSSFVRQLNTYGFRKIVPDRWEFANEFFRRGEKKLLCEIHR

SEQ ID NO: 1106 - protein, 37 aa, Pinus radiata
MGRAPCCTKVGLNKGAWSAEEDSLLGRYIQTHGEGNW

SEQ ID NO: 1107 - protein, 187 aa, Pinus radiata
TRSGSKNSARAPVSGFSMNSNMGVSGGLDESGFSQPPPNFAKMNAPTRTFTKVYKLGSVGRSVDVTRFRGYPDLRAELDRMFGLEGQLENPRSSWQLVFVDKEKDVLLLGDDPWEEFVNNVRFIKILSPPEVQQMSQEDMEFWSSIPTQQQTSSSSDDCVARNSSRNIRSVLTSPGSLDVLSVDPIV

SEQ ID NO: 1108 - protein, 130 aa, Pinus radiata
HDNEWKFRHIYRGQPKRHLLTTGWSVFVSAKRLSAGDAVLFIRNEKGQLLLGIRRANRSQTVMPSSVLSSDSMHIGVLAAAAHAASTNCRFTIFYNPRASPSEFVIPLSKYEKAVYHTRVSIGMRFRMLF

SEQ ID NO: 1109 - protein, 81 aa, Pinus radiata
MGRTPCCEKGHTNKGAWTKEEDDRLIAHIRAHGEGRWRSLPKAAGLMRCGKSCRLRWINYLRPHLKRGNFSEEEDEFIIKL

SEQ ID NO: 1110 - protein, 146 aa, Pinus radiata
MGRAPCWDKMGVKKGAWTLDEDKILVDYITKHGHGNWRALPKQAGLLRCGKSCRLRWTNYLKPDIKRGNFSPEEEDQIIKLHELIGNRWSTIASYLPGRTDNEIKNVWNTHLKKRLARMKADSVAVDAQPTPASSLASSTTEMTCH

SEQ ID NO: 1111 - protein, 72 aa, Pinus radiata
CIEANGGGAPGRSLPKAAGLQRCGKSCRLRWINYLRPDDVKRGNFTEEEDDLIIKLHSLLGNKWSLIAGRLP

SEQ ID NO: 1112 - protein, 112 aa, Pinus radiata
MRRLRCEKGNTNKGAWTQQEDARLIAYIRAHGEGGWHSLPRAAGLLRCGKSCRLRWINYLRPNLKRGNFSEEEDDLIIKLHNLLGDKWSLIAGRLPGRMEDQIKNYWDTHFK

SEQ ID NO: 1113 - protein, 148 aa, Pinus radiata
GKEVHIAEPDQVSDPPKAIKYEPPAVSCDQEKPLQKLSKETQVKQHGNPTRSCTKVHKQGIALGRAVDLTKFEGYEELICELERMFNIEGELRNPSKGWQVVYTDNEGDMMLVGDDPWQEFCSIVRKIFIYTREEVEKMTPQKHAKLQ

SEQ ID NO: 1114 - protein, 273 aa, Pinus radiata
ETQSSDNNYMVGFVLANVVGLQYYTGTINGREMIRLVREPENRYDPNAIKVLNMSGQQVGHIERAVALALASHVDQSLILIEGIVSRALHKGAYKLPCQIYIFSHRDSMGMVLQLLKGAGLNVITAEDQEFLTAESIAAKEIYEDPGVKEVRRVDDIFGSLNNPKKRQSMEACELVTSTLLQHQKEALAWMVQRENSSELPPFWDVCDKTSKSQQLRYKNVLTNFETNGRPKPLRGGILADDMGLGKTLSLLSLIATNRPGAKLPPVVDIAPS

SEQ ID NO: 1115 - protein, 129 aa, Pinus radiata
LIPQHNAFSLELRFSDRQLPSSTPPNCDSMFPSHYTALALRRQMWRNPRESGQSHSQPPEKDRGKTFGQFKGIRMRKWGKWVSEIRMPRSKERIWLGSYKTVEQAARAYDAALYCLRGPNAKFNFPNSV

SEQ ID NO: 1116 - protein, 90 aa, Pinus radiata
MDREKLMKMAGAVRTGGKGTMRRKKKTIHKTATADDKRLQSTLKRIGVNNIPAIEEVNIFKDDHVIHFANPKVQASIAANTWVGSGHRKQ

SEQ ID NO: 1117 - protein, 33 aa, Pinus radiata
GKTQMKLKRERDQQARDASKRRNGLLKKAYELS

SEQ ID NO: 1118 - protein, 107 aa, Pinus radiata
MGRAPCCANGDRSKGAWTKEEDDRLTQYIQAHGEGCWRSLPKAAGLLRCGKSCRLRWINYLRPDLKRGGFSEDEDDLILKLHALLGNKWSLIAGRLPGRTGHQNQNY

SEQ ID NO: 1119 - protein, 112 aa, Pinus radiata
RKSNVHSFCKTLTASDTSTHGGFSVLRRHADECLPPLDMSQQPPSQELVARDLHGMEWRFRHIFRGQPRRHLLTTGWSVFVSSKRLVAGDAFIFLRGESGELRVGVRRAMRQ

SEQ ID NO: 1120 - protein, 156 aa, Pinus radiata
ALREAIKNGACPNCGGSTSLGEMPGFDEHHFRIENTRLKEELDRVSGIATKYIGRSMPHLAPIATPPMLMSSLELAMGSFGGKQSQPAAPSVDFISGPLADGPIINCGTLTDLDKPLALELAMNGVEELIRMAQTDEPLWLKDVNAGSVKELFELG

SEQ ID NO: 1121 - protein, 116 aa, Pinus radiata
GFFIFMCRLPGRTLANGRLIWLCQANEADSKVFPRALLAKSASIQTVVCIPLADGVLEFGTTEVEREDPGLVQRTISFFLEYPKPICSEQSTSSPQCSDRDEKDQVGMVTIMSSDS

SEQ ID NO: 1122 - protein, 104 aa, Pinus radiata
FLFDSLDAVNINMEAVHKIEKFLLAPKIDATISSAAAPPWKTLFAAAGFSPVAFSNFTETQAEYLIQRLHSRGFEVEKAHAALLLGWQGRPLVSATAWRCGPPP

SEQ ID NO: 1123 - protein, 169 aa, Pinus radiata
EEKQLSISGRNWGEVNLEGNMLTFLVGSKPAFEVSLADVSQTQLQGKNDVVLEFHVDDTTGANEKDSLMELSFHIPNSNTTFAGDEASPPAQIFREKIMSMADVGSSGGEAVALFEDIAILTPRGRYTIELHLSFMRLQGQASDFKIQYSSVLRLFVLPKSPHTLVVIT

SEQ ID NO: 1124 - protein, 124 aa, Pinus radiata
LGHSQNFSTDVNRMPDVPPRRGGHRRAQSEIAFRLPDDIMFDGDLGFAGFDMPTVSDDATEAEDLISMYMDMEKLTSFGEPLNSAAGEGSKLPSGAETNRPPHHSRSLSVDAVFSGFEGNMEDT

SEQ ID NO: 1125 - protein, 70 aa, Pinus radiata
MDRSSSEDSVDSQGDVNANYKMVFSEDEKDLISRLYNLLGQRWALIAGRIPGRTAEEIEKYCSRRYISEY

SEQ ID NO: 1126 - protein, 120 aa, Pinus radiata
GGEIRILRGFFVNQKTDGQGSSFAASSSRNSSFSNGYDNPQNTNKNSSSGGTGDAGSFECNICLELAQDPIVTLCGHLFCWPCLYKWLHGHSKSQECPVCKALVEEDKIVPLYGRGKVGS

SEQ ID NO: 1127 - protein, 233 aa, Pinus radiata
MGAPKQKWTSEEEGALKAGVEKYGTGKWRTIQKDPEFGHCLAARSNVDLKDKWRNMSVSASGQGSRDKVKTPRVKAIASLPYSSVTAESTSVFSIEATTSTTPDNLISPKSSSNGKIHSPRYDGMILEALTSMQDPNGIDIATIASFMEERHELPPNFKRALGTKLRRLVAQEKVIKIRNSYKLKDMTSTEVTSEVLGSAIPIDNSMQYSNAFTNTIDTFSVDRVNEASMAAA

SEQ ID NO: 1128 - protein, 144 aa, Pinus radiata
HSRPLIKEEAESGDNSANSADVETLLPQVDETASADLTVFPGFVTPYVPYGFPIWHTFRPTITQTSNVYKPTAVMPTAPIKMDECTGLSQLSLGGVAAASAMKPSELSLKLHGRPPSRQSAFQAKPSLNESSSLSSSSNVISVV

SEQ ID NO: 1129 - protein, 187 aa, Pinus radiata
HPYMWGGQPLMPPYGTPLPYPAMYPHGGIYAHPSMPPGALPYGHYGMPSPGNAEVTTTLALPNAEAEAKSSEGKERNTMKRSKGSLGSLGMITGKGGEGGKATSGSANEAMSQSGDSGSDGSSEGSEEYNTQTESQVARKRSFDQMIVDGANAQSTNIQSYNSQAGEPYVTSGGHAMGNPISQAVAA

SEQ ID NO: 1130 - protein, 80 aa, Pinus radiata
GKVTASGKVTSGVNDLFWEQFLTETPGSATDTQEAESKIQETRTKDQDERLPENGKCWSNKQTLDQLTEQMGQLASGTQT

SEQ ID NO: 1131 - protein, 96 aa, Pinus radiata
MNMDSRQSGEEEDCNVTRPGGGGGISLHVSSVEYCQKSACVAHDISSDEQDLINRLHNLLGDRWALIAGRLPWRRREEIENYCKMRYTATTSSSRS

SEQ ID NO: 1132 - protein, 193 aa, Pinus radiata
ERERGRKPANGREEPLNHVEAERQRREKLNQKFYELRAVVPNVSKMDKASLLGDAAAYIKDLFSKQQDLESERVDMQVQIDTIKKELLMNSLKLAAKEAKDLSSIDLKGFSQGKFPGLNSEVRIVGREAIIRIQCTKHNHPVARLMIALQELDLEVLHASISTVKDSLIIQTVIVKMTRGLYTEDQLHALLCK

SEQ ID NO: 1133 - protein, 88 aa, Pinus radiata
MAYNRKHAAAATSPDSSLGSDNESGGGGGGGGGKGQSTKNGNGNYIREQDRLLPIANVGRIMKRALPGNAKISKDAKETVQECVSEFI

SEQ ID NO: 1134 - protein, 141 aa, Pinus radiata
MATRNPFDLLEDDDNGDPSSLLDTLAAAKDKPAAVAAKKQQPAVSASGKLPTKPLPPAQAVKESRVSPNEGGRGRGGGRGGRGFGNRESQEFGRGRGGGYNVERNFNRENNAYSGSRVGFYDNNSDLIPSRNEDGDGASND

SEQ ID NO: 1135 - protein, 43 aa, Pinus radiata
MPRVKLISRNFMDMVAALPAAKLDRLYDKSLHLRSGLRSLTPV

SEQ ID NO: 1136 - protein, 48 aa, Pinus radiata
MAEEMDTPTKTTKTPTSQEQTSTSTPVAYPEWAAPIQALYNSGKTPLP

SEQ ID NO: 1137 - protein, 190 aa, Pinus radiata
SFSSTRESMERRDQSPVAARHPMRKHYRGVRQRQWGKWVAEIRLPQNRTRLWLGTFDTAEAAALAYDRAAYRWRGECARLNFPHLFSKKYQNSSPSSTNGRIPRLSCEKSDQKYAYNGDPVHTNVYKGPPIRITAYNGDPVPIDVYRSDPVRVSAYTGDPVRISAYSGDPVGNTVTLAESELESSCSHES

SEQ ID NO: 1138 - protein, 177 aa, Pinus radiata
LDYMEEQNWDINGAKYDGSEKWKAHSSEQKDLGTIPTKVEGRIGNRENSLDVTRGGALWDIFRREDIPKLQDYLLKHCQDFRHSRNVSVDSVVHPIHDQTFYLNEGHKKKLKEEYQVEPWTFEQHLGEAVFIPAGCPHQVRNLKSCIKVALNFVSPENLQECIRLEDELRLLPKNHR

SEQ ID NO: 1139 - protein, 148 aa, Pinus radiata
GPREMTEEERETKKAASVAATAADQELRKKVLRDLHALINPNATGEADPAEFPGDDATVDGEVTDAEWFYLVSMMKSFGNGLGVPGQAFCGGMPIWIIGSEKLQSYNCERARQAQQFGIQTMVCIPTPNGVVELGSTDLNPQNWDLIQ

SEQ ID NO: 1140 - protein, 341 aa, Pinus radiata
MCGGAIIKEFIPANRSRRVTARELWPDFDTFAEFINGGATQETFNKPGKLDEGCKQKSKPSKGSVKTQQEFCSGFEGGRSEVIPPLEDVEGSTPTIGGRKRKNVYRGIRQRPWGKWAAEIRDPSKGVRVWLGTFNTAEEAAKAYDAAAKRIRGKKAKLNFADNSCSVKNDTSKKLSGKKGKLCSKHPALLLEGFNASCKVKPSYSANPDLLGGYNINRKVKASLSGVGKSDLTICGYDDMEYGDSGFSKPSAPFQNNSNACTVQFSEHSNLTQTSQKSCSCEICSHNYSEMSNVMPPAYGNAVNFEPVQTSNPGGYFDSDHSSMSFEGAHFPWAQEIKTPE

SEQ ID NO: 1141 - protein, 181 aa, Pinus radiata
AKTLHPCWDAYQLEDERASAVYINVFSGDATTEFPSALQLGRGGILADAMGLGKTVMTISLLLANSGKGGFSGMDTVEPFSANSCSEKTIIHPYNIGVELGPSQYTNKTQGTSMLRRSSSGLHKGGGNLIVCPMTLLSQWKTELETHVQSGTMSVYVHYGQSRTKDVKSLLQHDVVLTTYG

SEQ ID NO: 1142 - protein, 59 aa, Pinus radiata
MFVGMMSEVGSPTSQDSRNSEDGERENCAVREQDRFMPIANVIRIMRKVLPTHAKISDD

SEQ ID NO: 1143 - protein, 133 aa, Pinus radiata
MGFEQTRGGGGGAKMTQHQVVTTELVRQATERLRKLCRTGVKVELRDFFQLCIVLAKSIDSAVVYNQIPTMVHELPQLVRQVFERKDDIRLQPAIMVLMLSVKNACRSGWFRVTDTDELLTMSKELSSRFTST

SEQ ID NO: 1144 - protein, 169 aa, Pinus radiata
MTRKCSHCGNNGHNSRTCPNRGGVKLFGVRLTDGPIRKSASMGNLMMMSNPSSPADPSEPASAAAAAAAAAASGYLSDGLVEASTSSNSRERKKGVPWTEEEHRMFLLGLQKLGKGDWRGIARNFVITRTPTQVASHAQKYFIRQSNMTRKKRRSSLFDMTPVSFFFLS

SEQ ID NO: 1145 - protein, 103 aa, Pinus radiata
VSSRHEFAVSQMAYLQALRNAGATLRQFAELESMELQKTSPYPHLRHYRVTLPPSPPPLPPPPPPPPPLSLTPSPSYGSATFPSSIPVNRSIYRCPYQQCSPS

SEQ ID NO: 1146 - protein, 153 aa, Pinus radiata
QLPDEAIALAAASHIERELQITSWNLSCNFVASTLQGRECIERLEITGIGDPSGRGLGFSYLRVAPKPPISSALVKKKAAAARGGSAVTGTDADLRRLSMDAAREVLLKFNVDEEQIEKMTRWHRIAMVRKLSSEQAASGVKVDATALNKFAR

SEQ ID NO: 1147 - protein, 73 aa, Pinus radiata
MKSPSTSCLSHPVEGEQKSINSELWHACAGPLVSLPSVGSVVYYFPQGHSEQVAASTQKVADTHIPNYPNLPY

SEQ ID NO: 1148 - protein, 213 aa, Pinus radiata
LKVQWDEISAIARPERVSPWKLEPSLTPVAVNPLPVARGKRPRPNILPSSSDLSVHDKAPVDSTQVHRFPRVLQGQEVMTLGGSLGDGELESGQKMVAWGGSKLDDVKAEGMGCQRRLVSENWMPPLRHDSLYSDTFSSFQPVGEVQEFRGSLTNSILEDGQQPKLSRKQFQDQEGKIVDGSGLWSMSFPNSLQLCESNRKMSATSAAQSHKQ

SEQ ID NO: 1149 - protein, 217 aa, Pinus radiata
ELTSDSHRQATLQLEAEVTAWHISFCSLIKSQQDYICALYEWARLSLVQLGNEAQWERGNRPPIYTLCDVWQQVLKRLPDKVASESIKSFISVVHAIVMQQADEQKRKKKAENISRELQKKMIALRNIEKKYYSSYSIPARADATTESQFELGHTDPLAEKRAEIEIYKRRLEDEKANYSKSARGTREMTLNNIQTGLPGLFQALSSFSSVCASSFE

SEQ ID NO: 1150 - protein, 33 aa, Pinus radiata
MAMGEAERITGPWSPEEDTSLHKLVEKSGPRNW

SEQ ID NO: 1151 - protein, 127 aa, Pinus radiata
WRPAKFARNLLPNYFKPNNFSSFGRQLNTYGFRKIVPDRWEFSNEFFRKGEKQLLSEIHRRKGLIQPPPPPENRSISPSNSGDEQTWSSTSSPNSSTGVDALSHKNAIEENEKLRKENLLLVSELTQ

SEQ ID NO: 1152 - protein, 104 aa, Pinus radiata
PHGLQHHSSDDANGDGDKRIGVETGSSVCPELWHACAGPLISLPPKGSRVVYFPQGHLEQIADNELHRGGRGSFLNINHAAAPMAEEASSAAALNIPPSFISQP

SEQ ID NO: 1153 - protein, 146 aa, Pinus radiata
ETLTLLKIRSEMDSKFREATHKGPLWDEVSRALAEHGYQRSSKKCREKFENLYKYYKKTKEGKAGRQDGKHYRFFSQLEALYGGTTIDAADSCFGVTTRTNLTESPGLDFNGDGASQKYADTHHNSEGFSLSSDSSSDDEYSHDIQ

SEQ ID NO: 1154 - protein, 105 aa, Pinus radiata
IFYRLHCNLGEKSNKIYICLFTMELADEHSILRYKKPKLSKNVVSERRRRQKMNKLLYTLRALVPNISKMDKASILADAIEYVEKLKQQVERAESDVQSTNVSAL

SEQ ID NO: 1155 - protein, 83 aa, Pinus radiata
REFNINADVYAQDSIELLKQSGIDFEKNEEKGIDSHRFGELLMSSGVVLNENVNWITFHSGYDFGYLLKLLTCQNLPPEESDF

SEQ ID NO: 1156 - protein, 170 aa, Pinus radiata
MANRSLWGGSDFDYENEADTRKGPWTVEEDMQLGIVNLHGEGRWNFLARASGLQRTGKSCRLRWVNYLRPDLKRSKITPEEERLIIELHRRWGNRWSRIAQSLPGRTDNEIKNFWRTRMKGKLNSETQKDIAGVDADDGVQFESELGSCRLPVISSHALPEVDVAEPSST

SEQ ID NO: 1157 - protein, 119 aa, Pinus radiata
GTVGRKRRRIHRSSIGVTGGRGLRHFSMKVCKKVESKGWTTYNEVASELVAEFVNPNSTHLSQDQQQFDEKNIRRRVYDALNVLMAMDIISKEKKEIRWKGLPTTNLSDIERLKTERKR

SEQ ID NO: 1158 - protein, 97 aa, Pinus radiata
CPRAFARAYNLKTHMATHDPNRLKPHVCPHRSCARSFSRKHDLGRHLVSIHRDDSVVSTPSASMKSIGVDSGRRSWCDNCGKGTIGASCQCSCADIK

SEQ ID NO: 1159 - protein, 162 aa, Pinus radiata
HAPIFCRVARNFQLRVILKENRRRETFDGFLREDHEKVSQLVTQHYKVQLETKEISVKGWNWGSTDVQGNDLAFVVANRTAFEVPLRSITNSNIAGRTEVSLEFSTAPAPSASKSKKGRPDELTEIRFYVPGTHTKDDDDEADITKDDEEVSAAQAFHDMIK

SEQ ID NO: 1160 - protein, 163 aa, Pinus radiata
GSGGVKMEDHSPVIINSQSGYCQSQQSSQMPLAGYMSPHGIPIQHTDDAASKETQYLRRRCFNCHTTEPPSWRRSTLTPGKIVCNKCGLYERTHLRPRPLRFDELRAGNKSRKQTKSSPKGAKVIPPGPLPIKKEPAEMEAISRRMSVSSSSSAQSGGGGSSD

SEQ ID NO: 1161 - protein, 148 aa, Pinus radiata
RNLLGARAQPMKLSAKNDSKLGIARPAKLYRGVRQRHWGKWVAEIRLPRNRTRLWLGTFDTAEEAAFAYDTAAYQLRGEYARLNFPDLRYLLLSNSDNGSHNVLSPPGNALSVLKSSVDAKLQAICQRLSQENSSENRLMAHSANNEA

SEQ ID NO: 1162 - protein, 48 aa, Pinus radiata
FLEALEKREEDRMMREEAWKRQEMARLNKDQELRSQERSMAASRDLAL

SEQ ID NO: 1163 - protein, 255 aa, Pinus radiata
VALSNNPLIFSAKVENGTPSYDGLKHANTNPMPFSGLGNVSMGPLFYQANPIQRVKRVRDTSFIMGPPSSPFGRMGVNGHMGMNDVSKSLQPGFKARVPYPLQAARSDSFVAQGCFPYDPNLSSTSNLPLGGFSSGSHAVMNGTFSSSRLFSGQKLELPSSQFAESVQTAGSSINPVLNRSTPLLLPPVPTQTINQVDYSFSTPKNSGLLESMFQEAQTMGGVKAHSSSNSSIDLQGGSKSSISNPLNNGFLCRS

SEQ ID NO: 1164 - protein, 147 aa, Pinus radiata
IRMEEPLQIINSSPIQQQHDHDDDDHGHGHEEEVIPHPLLPPPGDTCIVPYIMPVSTSTAEKHPPQPTNIAFNGPETEEDDKKRDREHKKRSKNWTRVETLKLIKLRTEFEPRFSRSGRKTELWDEIAESLRKEQFFRDAQQCRDKW

SEQ ID NO: 1165 - protein, 202 aa, Pinus radiata
MDQQQPTIPALPQVGYGTNPYIAPPIGGPPHPQLASYHQQLQAFWGNQMREVEQAQDFKTHSLPLARIKKIMKADEDVKMISAEAPVVFAKACEMFILELTLRSWIHTEENKRRTLQKNDIAAAIGRTDIFDFLVDIVPRDEFKDEGLVIPRAAGAVPFMGPGDNVPSYYYVAQQAPNVAAYAPPTQQMRSKAPAPPPHGSS

SEQ ID NO: 1166 - protein, 143 aa, Pinus radiata
QGSLTLPRTLSRRTVDDVWREIHKENIDGNGNAPANQARQPTFGEMTLEDFLVKAGVVREDAEQGDGQSFGAFRNALDGEFVANLAERNGDNRLGIGNSLGLGFGERGHRNGEVGSNKSGAGGVPGLSLSPTNVFLIMLPWIW

SEQ ID NO: 1167 - protein, 90 aa, Pinus radiata
FQRRKKKSIGRGCLKTSINDVEQLKAEKLLLKSRIEKKASYFHELEEQIIGLQNLVKRNEHRYSSGNTPSGGVSLPFILVQTHPRATVEI

SEQ ID NO: 1168 - protein, 105 aa, Pinus radiata
GIRRATRQKSGILSSVLSNQNAHLSVLAAAASAVATKSMFHVFYNPRTSPAEFIIPYQKYVKSCKQPLSIGMRFKMRFETEDTAERRYTGMITAIGDADPARWPG

SEQ ID NO: 1169 - protein, 106 aa, Pinus radiata
QDTHSEPMAMEMGLVIDGDRFSSEGDGDIMLDGEDLLPEINDMFWEQFLAESATSGGTEEAESAAQESLTKDQDEKPSENGNWWKKNQNMDNLTEQMGQLASESNP

SEQ ID NO: 1170 - protein, 144 aa, Pinus radiata
DGAVRDAGRLVPAPFLVKMYRLVDDPSTNHIVSWGENNNSFVVWRPKEFSASVLPCYFNHANFSSFVRQLNNYGFRKTFRGQCEFSNKLFEKGKQYLLCHIHRRRASNSSPMPMEYGKSSLLFPIILPTQHSNVLAAPLPSSLS

SEQ ID NO: 1171 - protein, 62 aa, Pinus radiata
KERILTEENLFLRKKCGDEHVDCSAFRTPPAQLRSIQNIDVETQLVIRPPTVQQHPDVDSPR

SEQ ID NO: 1172 - protein, 88 aa, Pinus radiata
DPNAPKKAMTGFMFFSQVERENLKKSDPGMAFTDVGRTLGERWKKMSAEEKAPYESKARADKERYKEAMADYKSGPTNVDSGNESDSE

SEQ ID NO: 1173 - protein, 106 aa, Pinus radiata
LLFGVNIDSSSLIVPNTVSNMRSIGSSTDAVMQFGVSNYLNAPPCASGSNISLNSDISASACLDESGLLPPAENLGQMNAPTRTFIKVYKQGSVGRSLDISRFSSY

SEQ ID NO: 1174 - protein, 108 aa, Pinus radiata
MATTRHQRSPDSSPRSEDESGAHTYSNQDGSVKEQDRFLPIANVSRIMKKALPANAKISKDAKETVQECVSEFISFITGEASDKCQREKKKTINGDDLLWAMGTLGFE

SEQ ID NO: 1175 - protein, 137 aa, Pinus radiata
KSDYRDSDDEGGGTVREGKDLQTSNFIDYFGQSNHTEEAENEHDASVDTKGPLESSNEVGHPTTYPESSSLSAQGSEPRVFSCNYCQRKFYSSQALGGHQNAHKRERTLAKRGQRIGAFQHRYISMASLPLHGSTES

SEQ ID NO: 1176 - protein, 206 aa, Pinus radiata
SRGKALKLFGFEFRGSEGGSFEGTNGSDQPQDGTNILTAGEASTEPVEEELVIEAKNGDSGKLEDVGSPVEAGESGSTSNCLGSSAQENRKYECQYCCREFANSQALGGHQNAHKKERQQAKRAHLLATRSAAASANRSGATAWCGNINGNLYHRNFLFNNSYFTRMQVFQEDFPTFQTPQAVAAPSIPHYIFSYQQQQQAPVQSR

SEQ ID NO: 1177 - protein, 116 aa, Pinus radiata
VPENSKQIINHGLILPEMGSVDSGREGTRAILSDDCVKFECRYCCRVFPTSQALGGHQNAHKRERRRAMTRFQRSPSDSSNYSGKQNSIDLFSRERVPGSSLLSPHGTRDHVVCSD

SEQ ID NO: 1178 - protein, 122 aa, Pinus radiata
KKASEWGESVVSTSENSNDLDPPTYSETSSPAQGSDPRVFPCNFCQSKFYSSQALGGHQNAHKRERTLARRAQRMGSFAQRYSSMASLPLHGSSETSWTPSRFLGIKAHSLIHKPFPEGDNL

SEQ ID NO: 1179 - protein, 113 aa, Pinus radiata; identical to SEQ ID NO: 1074

SEQ ID NO: 1180 - protein, 76 aa, Pinus radiata
MRRPQRKKKTDAEDDFDECYYTHMCKICKKKFVSGRAFGGHMRIHGPVATAAAAAAESNGKNLEPQRKRSRAEEIR

SEQ ID NO: 1181 - protein, 130 aa, Pinus radiata
VGCKGSDAFEESLKHFCRVCKRRFACGRALGGHMRVHGAELGAIKGGGLEEQFEKGRVKEPSRSCGDSVKEGVQDEVEGLNSMYTLRRNPKRSWRFADQDYSFAFGGVDGSGAKRFGSTFLRDSRVCEEC

SEQ ID NO: 1182 - protein, 86 aa, Pinus radiata; identical to SEQ ID NO: 940

SEQ ID NO: 1183 - DNA, 462 bp, Eucalyptus grandis
  misc_feature (1)...(462): n = A,T,C or G
acaaacaaacaaacaagacggaacgagatgaagacggttcagtcgaagaagttcaggggcgtcagacagcgtcactggggctcttgggtttccgaaattcgccatcctctgttgaagagaagggtgtggctgggcacgttcgagacggctgaggaggcggcacgagcctacgaccaggccgccatcttgatgagtggccgcaatgcaaagaccaacttcccgacatctcaaaccacgaacggcgaccccgccgctgccaattccttgtcttcctcgaagcacttgtcggagatcctccacgcgaantcaaganatgcagcaagacgccgtcgccatccctcacctgcctaaggctcgacactgagaactcccacatcggagtctggcagaagggtgccggccagcgtcagactcaactgggtatgaccgtacagtcggaacaaaaatccgatccattggtag

SEQ ID NO: 1184 - DNA, 340 bp, Eucalyptus grandis; identical to SEQ ID NO: 226

SEQ ID NO: 1185 - DNA, 190 bp, Eucalyptus grandis
cttggggttgacatggcgcgacgtggcggaggaaggaggcgaacggcggctccgaggcgtccgacgccgtcttgccgcgagctcatcatcgccatcgttacaagggagtgaggatgcggaagtgggggaagtgggtggcggagatacggcagcccaacagccgggaccgcatctggctcggctcctacgc

SEQ ID NO: 1186 - DNA, 473 bp, Eucalyptus grandis
  misc_feature (1)...(473): n = A,T,C or G
aacaaaggtntgtgtatggaaccattctggatagcattgcaaaggttactggaattgtgaagtttgatctgcatgctgagccagaggaaggaaaaaagaagattgaggtcggaggaaatgttgcaggtgtgtttgacctaggaccaggtagaattnggttctgaagctgtttttgtccctcgagagcctggcatcacttctgaagaagatgatgggtacctgatattctttgtccatgatgaaagcacagggaagtcggcagtaaatgtaattgatgcgaaaaacatgtcatctgatcctgttgctgtcgttgaattaccccatagggttccttatggcttccatgccttcttcgtgactgaggaacaacttcaggaactggctaagctgtaggtctctacatgcacgaattgttgggaatgcagatgttgcgaggggaggcatatctctggaaagctgctacagttgatcta

SEQ ID NO: 1187 - DNA, 333 bp, Eucalyptus grandis
accagatccagatgcagaggtcattgcactatcgccaaagacgctcatggcgacgaacaggttcgtttgcgagatatgcaacaaaggcttccagagggaccagaacctgcagctgcaccggaggggccacaacctgccatggaagctccggcagaggagcaaggagatcgtcaagaagaaggtttatatatgccctgagaagacgtgcgtgcaccacgacccttcaagggcacttggcgacctcactgggatcaagaagcacttcagccggaagcatggcgagaagaagtggaagtgtgagaagtgctcgaagaagtacgcagtccagtcaga

SEQ ID NO: 1188 - DNA, 420 bp, Eucalyptus grandis; identical to SEQ ID NO: 234

SEQ ID NO: 1189 - DNA, 365 bp, Eucalyptus grandis
  misc_feature (1)...(365): n = A,T,C or G
tgacgccgagcgacgtggggaagctgaaccggctggtgatcccgaagcagcacgcggagaagcacttcccgctgccgggcgggccggcggcgacgatgaagggcgtactgctcaacttcgaggacgtcggcgggaaggtgtggcggttccggtattcgtactggaacagcagccagagctacgtgctcaccaagggttggagccggttcgtgaaggagaagagcctgaaggccggcgacaccgtntgcttccagcggtcgaccgggccggacaagcagctntacatcgacttcaagccgcggggccagccgccggccggcccggccgcgccgccgccgccgcccgtacagatggtgaggctgttc

SEQ ID NO: 1190 - DNA, 434 bp, Eucalyptus grandis; identical to SEQ ID NO: 324

SEQ ID NO: 1191 - DNA, 479 bp, Eucalyptus grandis
gaatcgtttcttggactttcttgagctgctcctttcgcctcatttctcaagtgcgtgaaaaccaaaaaaatggtgagggggaagactcagatgaggaggatagagaacaagacgagcaggcaagtgaccttctcgaagcgtcggaacgggctgctcaagaaggccttcgagctctcggttctttgcgatgctgaagtcgccgccatcattttctctcctactggaaaactttatgagttctctacctcaagcatgagcagcataatagaacgatatcaaaggaaaacaaaggacccggggtgcagcgagaaaactaccgaaatcgatttgcagaatatgaagggaaactctctagacatggcaaagatgatcgaacttctcaacgtttccaacagtcggctctcaggagaactttcagatacgtgttcagttgaggagctacaatcaacacagaacctgttagagagaagcttatccaa

SEQ ID NO: 1192 - DNA, 310 bp, Eucalyptus grandis
ccctcttcctcttcctctccctctctctgtcgcagagctccgtctgaactcgcagaatccacgcgcagagcgacccaagagtgtttcagaacagtccgtccatggccttggaagctatcaactctcccaccgcggcctcagcgccgttccagttcatggaggagcccttgagctcccgcttcttggagcccctgaacaagcgcaagcgctccaagcgcccccaccaccctccctccgaagatgagtacctcgccctctgcctcatcatgctcgcccgcagcggcgccgcccccaagcccaaccaccacgc

SEQ ID NO: 1193 - DNA, 466 bp, Eucalyptus grandis
tttttttttttttttattcaaaaacaaaatctcacttgccctttcttaatatatagtagccaaagccttctggagatcaccttttatcagctaccaccagtcagataggtctattgaatatgcttgattgctcgttcctcaagcatatgcaactacaaagactcccatatcaaagcactagctgcatatacacttttaagctaactaacaagagaatttaaaaagaaaatcctcgctgcaccaaaaaggctcgatccatatgggcaccaaaacaaatagctcacattggcataagctttggaccattatcaggcatgcccatccctgcagctaactcagcatcaagctgagtatgtggcgcaggacccatcatttgcttcatacgtttcttgtggcgcttcgtcttgaaatgctcgtccctcgtagcaacattcggaaaatatcggtcgcagtgcaggcaatagta

SEQ ID NO: 1194 - DNA, 295 bp, Eucalyptus grandis
gccacccaacacacacccaagaaaattcttagagcctccttagatatgcctacagacctggacaattcgtccacagcttcaggggaagctagtgtctcgtcttctggcaatcagccgcctccacaaccaccgccaccgccttccaccaccaagaaaaagaggaatctccctggaatgcccgatccagatgcagaggtgatagctctgtctcccacgaccctattggccaccaacaggttcgtctgcgaaatctgcaacaagggatttcagagggaccagaacttgcagctccaca

SEQ ID NO: 1195 - DNA, 337 bp, Eucalyptus grandis
tccaccctcactcgcgaagtcaaaatcttctagtgtagccatattcttgatgaacattcacacgcaactaccgtcggacgtgcgggtgccgacgccggcgcagtcgtcttcgccgtccccgtcgcagtcgtcgcagtcggagtcctccgcgagccacgccgcgtgctccgacgaggagccggccgtggcgctggcttccagccggcccaagaggccggctgggcggaaggtcttcaaggagacgaggcacccggtgtaccgtggggtgcggcggcggaacaggggcaagtgggtgtgcgagctccgggagcccaacaagaagacccgggtatggctc

SEQ ID NO: 1196 - DNA, 450 bp, Eucalyptus grandis
  misc_feature (1)...(450): n = A,T,C or G
gaatgatgcatgtgatggaccggtaacaggacttgcactgtcaaagtgccgnacgctcatcggtctgccagaaactcacggagagagagagatggcggagagagaggagaaggggaagtacgacgagatgatgatgaagaaggggagcgacgganggatagcggaggtgaatcccacgccgaagaagggggtgacgtccaaggttgtggactacattgagaagctgatcgtgaagttcatgtacgactcctctctgcctcaccaatacctcgccggcaacttcgctcccgtcgccgacgagacccctcccgtcaccgacctccccgtcgtcggccatctccctgattgcttgaatggagaattcgtccgggtgggccccaatcccaagtttgccccggtcgccggataccactggtttgatggagatggcatggntcatgggatgcggat

SEQ ID NO: 1197 - DNA, 351 bp, Eucalyptus grandis
ctccagccagcttctgtctcttataaacactagccccaccccattcattatccacttcactccaacccaacagctatcgcactatcccactgcagacgccctcccacgaaccctttctcttctgatccccatcccaactcctgccgcttcgacttccccaagccgtccttctcgtcgccgctgtccaacgggagtagcgccatggcagcccccgggaacttctccgacgaggaggtgcgcctcgcgtcccaccacccaaagaagcgcgccgggaggaagaagttccgggagacgcgccaccccgtgtaccggggagtgcggctgcgtgactcgggcaagtgggtctgcgag

SEQ ID NO: 1198 - DNA, 359 bp, Eucalyptus grandis
agaacacctcagaatcaacaccactccccaatttctctctctaagatcccacacccaaccgccaccctcaatctctctctttctctctcttcttcagtgtctgccatggctttggaggccctcagctcccccaccgctccctccgccccgttccaattcatgaaggactcctcccccgccgccgccgccgccgcctcctcctcctcctccgcctacgacctccccctcgccgagccctgggccaagcgcaagcgctccaagcgcccccacaacccgccctccgaggacgagtacctcgccctctgcctcatcatgctcgcccgcggcggcgccggccggaccctccccccgccgcctcc

SEQ ID NO: 1199 - DNA, 645 bp, Eucalyptus grandis
  misc_feature (1)...(645): n = A,T,C or G
tcgactgagagatcctagtggaaatagaagatttcctgataccatcgatccattcttctccaatggctgcgaatttcgtcattccaaccaaaatgaaggcttgggtgtaccgtgagcacggagacgtcgccaacgtattgggattggacccggaactcaaggtccctgaattgcaagaaggccaagtgctggttaaagttcttgccgcggcgctcaatccaatcgacaccgcgagagtgaangggggttatcaagctcccggcttttctctaccggccgtgccaggttacgatctcgccggcgttgtggtgaaggtgggccgcgaagtaaaggagctcaaggtcggggacgaggtatatggatttatgtttcacgccaagaaagacgggacgctggctgagtacgcagccgtggaagagtcattcttggctttgaagcccaagaagctgcgtttcggggaggctgcttctctgccgtggtcattcagaccgctatggaggccttgaaagaactggcctctctcatggcaagtcccttcttcgtcttaagtggtgctggtggcgtcggcacactcataatacagctagcttaaggaagttttggtgcatcaagagttccagttcattcaacactgggaaacctaga

SEQ ID NO: 1200 - DNA, 376 bp, Eucalyptus grandis
  misc_feature (1)...(376): n = A,T,C or G
tttttttttttttttgtgtactggtgcactatgaattgtgagcattcaatcaaactatatatagacaacattcttccttatataggcgggagcaactacggngttgacagcaaaatttacaaagccagcagctagcacaggatgtcaagattcacctccaaaccgataaagtcgacatggctctattaatccagccaagatatagagccccctccctctgctcgattctgtaattcccgtgatactgcttcagcatatcgagcacagcacgagtaaccgatgcgtccactggtagctgattgaaaccggccatttggaatctggaccgccatttgccgaaaagctcatgcctttccatcctctcangcccatcaca

SEQ ID NO: 1201 - DNA, 461 bp, Eucalyptus grandis
cgacaccgaccagggtgttcatgtattgtttgtatacaaccccccagtggaaagggcccaaaacacaagccaacatgcacatgtaatgtctgtctgaccgtaaagcgccgtttccgcaccttgatgctgaggcgcgaaaagaaacagttggagaaagaaggggaaggttcgcgcaagaagctgcaacatcagaacctatcacttgcagaaaaatcaccggaagacgacccttcaaagtgcaataacaacaatgcaaatggcagcccaagccagaaaaaggtgggcaatgatggttccgacgacgaaatgaacagggttaaaagctcgggttcaccttttaaaggtcagatcgatcttaatattcagccagagcgcgaggaggagctctcgcctgggtcagattctggtggtatgatgaagttgctacatgatgccacccagaatatctcaggcagagggct

SEQ ID NO: 1202 - DNA, 447 bp, Eucalyptus grandis
ggaagtacgacgagatgatgatgaagaaggggagcgacggagggatagcggaggtgaatcccacgccgaagaagggggtgacgtccaaggttgtggactacattgagaagctgatcgtgaagttcatgtacgactcctctctgcctcaccaatacctcgccggcaacttcgctcccgtcgccgacgagacccctcccgtcaccgacctccccgtcgtcggccatctccctgattgcttgaatggagaattcgtccgggtgggccccaatcccaagtttgccccggtcgccggataccactggtttgatggagatggcatggttcatgggatgcggataaaaaatggcaaagctacttacgtctctcgctatgtgaggacgtcgaaacttaagcaagaggagtactatgggggagctaaatttatgaagattggagaccttaaagggc

SEQ ID NO: 1203 - DNA, 454 bp, Eucalyptus grandis; identical to SEQ ID NO: 301

SEQ ID NO: 1204 - DNA, 352 bp, Eucalyptus grandis
gttttttacgcatgtagaaaaagtcattgagtttgcctgtgctgcatacattcattgctttagctgactggggcctgagagagtttgtgtatgttactggcagacgccgaaggcggaaaggagaagaaggaagttaaagaaaggttcgccttcaagacgaaatccgaggttgagatactagatgacggattcaagtggaggaagtacgggaagaagatggtgaagaacagtccgaatccgaggaactactatcggtgttcggtggaaggctgtcctgtgaagaagagagtcgaacgggacagagacgacccaaggtatgtaataacaacatacgagggcatccataatcacc

SEQ ID NO: 1205 - DNA, 400 bp, Eucalyptus grandis
ccgaaatggccgaacttgatgaatcttccactttggaactcatcacgcagtatctcttagaagactctatcaacctcgctcaactccaaccggtgaaaacagagaacctgtttctcgatccaggaccagactcgccagattcagatcatcccacctggcaagacctggagacaccaaatcttgagattaaagccgagcccatcaccttggaatctccagagtcggagttggggtcgccggagaagaatcaggacgaggctggctccgcggccaaggcaagttacagaggggttcggcgaagaccatggggaaaatatgctgcggagatacgggacccgacacgtaaagggagccgggtctggttagggacctacgacacggacgtagatgctgccaaggc

SEQ ID NO: 1206 - DNA, 408 bp, Eucalyptus grandis
  misc_feature (1)...(408): n = A,T,C or G
tttttctcccttggtgcgtgatgtgtggaggcgccatcatttccgacttcgtcgagngcggctcgaccgccgccgccccgggagctgccgccccgagaggaagctgacccctcacgagctctggtccgagctcgaccccgcctccgacctcctcagcctcgacggccccgtggcccaaggccaccccaaccctttctctctcgtcgcaaaccaactcaaccaagtgatgaagagtgaagagaagaacagtgaggaggcgggtcacggacacgtgtcggagacccagaagagccagagcaatggccggagccagagggctcgcaagaacgtgtacagagggatccggcagaggccgtggggcaagtgggccgccgagatcagggacccccacaagggcgtccgcgtctg

SEQ ID NO: 1207 - DNA, 270 bp, Eucalyptus grandis
accgtgggatccggcagcgcccgtggggcaagtgggcggcggagatccgcgacccgaggaagggcgtccgggtctggctcgggacgttcaacaccgccgaggaggccgcgcgggcttacgaccgggaggcccgtaagatccgcggcaagaaggccaaggtgaatttccccaacgaggacgacgccttctccaccatcccgcgggctcaccagacccagcaccaccacccccaggtccccgaactaccctcctctgtatcaacccaactgg

SEQ ID NO: 1208 - DNA, 339 bp, Eucalyptus grandis
ctttctgctggacggaaaccactttggggcagctcgatccccgtgatgcgcaactttggggggccaccaggtctccttgcgaggcaatgaatgagggcgggccattgaaaaccataaaggataccaaaatcgataatatgcagtttcgtcgctttctcagatatgcttaaaatcatatggttagaatagatgatcgcaaacctctgaaatgggaaaactgagagataagctcggtaagctttcaacatttcagtagcagatttccttttggagcctaactccgtatagacttgcgctcctgtgcaatccatgcgtgccttaagggcttcggcaaaagag

SEQ ID NO: 1209 - DNA, 405 bp, Eucalyptus grandis
aaaccctgcaattcaggaaaagaaacccctttttgatctctctccatctgctccgatggtcggttcggaggggatgaattcttgaaaaacaaggaggaacgatcgtctcctttcttgggggggctggggattggggggaggaatgggggcgcagcacaactcaggacgaacccggaatgggagacccatgtgatcctgaacgtgtacgatctcacccccgcgaacagctacaccgcctggtgcggcctgggcatcttccattccggcattcaaggttctctgtgtagttgcattcttccagaaagccttcaagtaactactgttaagccagagtatcatgacttctccgaggaagatggtgctgaatctgtgtcgactgtgactaccgagatagatgacgccgag

SEQ ID NO: 1210 - DNA, 521 bp, Eucalyptus grandis; identical to SEQ ID NO: 238

SEQ ID NO: 1211 - DNA, 537 bp, Eucalyptus grandis
ttcgaaaatcccatttcctctcgacctgtgtagcttgcaactcttggagtcttgatagagaaggagagagaaggagaaagagtgggtgatgggtttcgggggaagttggagcgtgcccgcgaaggcgtgcgactcgtgcaagaccgcggcggcggccgtgttctgccgcgccgacgcggcgttcctgtgcctcggctgcgacgcccgggtccacggggccgccaagctgtccgcgcgccacgagcgggtgtgggtgtgcgaggtctgcgagcaggcccccgccgccgtcacctgcaaggcggacgccgcggcgctctgcgtcacctgcgacgccgacatccactccgccaaccccctcgcccgccgccacgagcgggtgcccgtggagcccttcctcgacgccgccgagtccatctccagggccgcctccgccttcaacttcctcgccgtgcctaccaagaccggcagcgccgacacgtgcggcggcggcggtggcggcttcggcggctcgtgccagaatgaggagctggaggaagc

SEQ ID NO: 1212 - DNA, 399 bp, Eucalyptus grandis
ccgaaacgcctttttcctcacatttcccatctccttttccaagaagcgaagcccgaaaagtccaatccccgttcttccaaaccctgcaattcaggaaaagaaacccctttttgatctctctccatctgctccgatggtcggttcggaggggatgaattcttgaaaaacaaggaggaacgatcgtctcctttcttgggggggctggggattggggggaggaatgggggcgcagcacaactccaggacgaacccggaatgggagacccatgtgatcctgaacgtgtacgatctcacccccgcgaacagctacaccgcctggtgcggcctgggcatcttccattccggcattcaagtgcatggtaaaggaatatggctttggagcgcacgacttttccagct

SEQ ID NO: 1213 - DNA, 283 bp, Eucalyptus grandis; identical to SEQ ID NO: 270

SEQ ID NO: 1214 - DNA, 324 bp, Eucalyptus grandis
ttttcaagaagcacgcccacgtaacgggggaaatgctgagggagaacccatctgacggttctttttgttgagggaagggaaagagagaggaggcagagggaggaaggaatccgcagcagcagtcgtcggaggaggaggacattttccaggtgaaccccaagtagaattgcgatattggtttattcgtaatgggctgcgtcgcttcaagaattgatgaagaagagagggttcgggcgtgcaaggagagaaagaggctgatgaagcagttgctggtgtttagggaagaatttgctgatgccctgttggcttacttaagagccctga

SEQ ID NO: 1215 - DNA, 358 bp, Eucalyptus grandis
tttaatggccttgacgcaggggaggggagattttctgaacttggggagatggtagaatagctgccgaggtgtcaactcatgtcagaattctgactgatctggggatcttgctctcaaagaggatttctaagagcagtatctcaacttggcatacgttcagcaactggaaaatagtaggttcaggcttatgcaactggaacaggagcttcaacgagcacgccagcagggtatatttgttagttctggaaatcctggggatctcagtcataacatggctgccattggcaatggggccatggcctttgacaccgactatgcccggtggctcgatgagcatcaacggctgatcaatgaccta

SEQ ID NO: 1216 - DNA, 329 bp, Eucalyptus grandis
ccgctgtggcaagagctgccgcctccggtggatcaattacctgcggccggacctcaagcggggcaacttcaccgaagaagaggatgagatcatcatcaaactgcacagccttcttggtaacaaatggtcgctcattgctgggcgtttgccggggagaacggacaacgagatcaagaactactggaacacgcacataaggaggaagcttttgaaccgaggcatcgatccggccactcacaggctgatcaatgagcccgcacaagatcaccatgacgagcccaccatttcttttgctgctaattctaaggagatcaaagagatgaagaaca

SEQ ID NO: 1217 - DNA, 346 bp, Eucalyptus grandis
aagaacgtcgccccatcaactccacccggcgttttcaagaactcgcagagatcaagaactcgagccggcttctgcagcgtgcaccgttatgccgtcggagtgcgccgaccgcaagcccgcgaaggccccccacggcggccacctccacgcggccggggcgggggccgccgcgccgcagccgcaggagcaggagcacctcccctgcccgcgctgcgactccaccaacaccaagttctgctactacaacaactacaacttctcccagccccgccacttctgcaagtcctgccgccgctactggacccacggcggcaccctcagggacatccccgtcggcggcggcagc

SEQ ID NO: 1218 - DNA, 468 bp, Eucalyptus grandis
aaactgggatagatggcgggcagacgatgaaaacgttgatagggagcttaatgataatctaaatgcaccttcataccctcctcaccaacctacgcaatcttatccaagaggaggctatagagtatgtagtggctgcaaccgtcaaataggctatggcaactatttgggatgtatgggaactttcttccatccggaatgctttctctgtcgtgcttgcaggtaccccattcaagaatatgagttttccttagcaggaaaggatccttatcaccagtcttgcttcaaggagttgacacatccaaaatgtgaagtttgccatcaatttatcccaacaaatggagttggtttgattgagtatagatgccatcctttctggtcccagaaagtactgtccgtcgcatgagcttgacaaacacagctccgatggttgtagttgccaacggtttggaggcatgggaacaccaccat

SEQ ID NO: 1219 - DNA, 162 bp, Eucalyptus grandis
tgaggtagatattcttgacgatggttatcgctggcgcaagtatgggcagaaagttgtgaagggaaacccgaacccaaggagttactacaagtgcacaagtcctggctgcacggttaggaagcacgtagagagggcgtcacatgaccttaagtcagtaattac

SEQ ID NO: 1220 - DNA, 354 bp, Eucalyptus grandis
gcctggcatcacttctgaaagaagatgatgggtacctgaatattctttgtccatgatgaaagcacagggaagtcggcagtaaatgtaattgatgcgaaaaacatgtcatctgatcctgttgctgttgttgaattaccccatagggttccttatggcttccatgccttcttcgtgactgaggaacaacttcaggaactggctaagctgtaggtctctacatgcacgaattgttgggaatgcagatgttgcgaggggaggcatatctctggaaagctgctacagttgatctaatagtttgatatttacatggacagacatctttatgctaaatatagtggaaatataaagtatggt

SEQ ID NO: 1221 - DNA, 310 bp, Eucalyptus grandis
gcggaggaggggctgagtcggaaattggggaactcggttgcttgcgaaggtagggaccgggtcgaaagatgcgaggtgttcgggaagtggagggcccgcatggggatggctgggttcgagctgaagccactgggtcaacacgtggccgaatcaatgaaggcgaggctcgaaagtgggaaccgggtcaacccgggattcacggtgaaagaagagaatggtgggatttgcttcggctggctcggccgaacactcaccgtcgcatccgcctggcgttaagctccactcgctccccctctctcccccctgtgca

SEQ ID NO: 1222 - DNA, 315 bp, Eucalyptus grandis
  misc_feature (1)...(315): n = A,T,C or G
atttcagatcccatcatgnatgcatgactttgccattacagagaattatgcaattttcatggatcttcctctttatttcaggcccaaggaaatggttanagataacaagctaatatttacatttgataaaaccaaaaaatctcgctttggggtacttccacgatatgcaaagaacgagcttcaaatcagatggtttgagcttccaaactgcttcatttttcacaatgccaatgcatgggaggaggaagatgaagttgttttggttacatgccgtcttgagaatcttgatctggacatggtcagtgggactgtcaa

SEQ ID NO: 1223 - DNA, 393 bp, Eucalyptus grandis
gcttaatcctcaaagaaagtgaagctacccttcgtgaagctcttcggaacatgatgcagaatggcaaatcgaaagtgccaaatgaggggaaggcccacggcaagaagcaaggcaggcgcaagagggatgtggtcgacttgagaactcttttgacactttgtgcacaagctgttactatggatgatcgaggaagcgcaggtgagctgctcaagcagatcagaaggcatgcgtctcccacaggggacgggatgcaaaggatggcacactattttgcgaatggtctgcaggcacgccttgccgggtcaggctctcaaatttttaaggctctcatggctaggccaagatcggctgttgatgtcttgaagggttatcatctcctcctcacaattttgt

SEQ ID NO: 1224 - DNA, 337 bp, Eucalyptus grandis
  misc_feature (1)...(337): n = A,T,C or G
gagaaatcctcatcatccgtcaaggcaatctcggatcctcaagccagccactgnagaagtgttcgtagcatctcttctcaaagatctagccgagatccccggccttcttcaagcagcttacgatctttacaagtgggaccttcagaagagagactgccatcagtcgcagatggttactcaagacattcgaggccactttctgccataggatggcgtaataatgatggggctcggagatcaagggtatctactgaaagatttcggtcgtttcctgatgaaggaagtggccgtgatcaattagaatatgagggattcatgattgcggatcgcccaggtt

SEQ ID NO: 1225 - DNA, 226 bp, Eucalyptus grandis
  misc_feature (1)...(226): n = A,T,C or G
tgttggcaccatgtacacacacagtgtggtaaagcaggctttgggatgctcaagcaagagaatctgagcaatgaactagatagggtcaaaaaggagaacgacaacttgcagattcagctcaggcacctgagagngaagacataacatcactgaaccacagagagctgataatcctagaagacactcttgaaaacggcctcggatgtgtccgagaccagaaggacga

SEQ ID NO: 1226 - DNA, 415 bp, Eucalyptus grandis
cggaccgccaggactgcacggtggcgtgccggatgttcgggccggggtgcttcgggggcgagcccttcttcgtggcgagggatccggacgattcggaggcggaggaggacgacggctacgtggtgagttacgtgcacgacgagcgcaaaggggagtcgaggttcctggtgatggatgccaagtcgccggagctggacatcgtggcctccgtccggctacccaggcgggtgccgtacgggttccacgggctattcgtgagggatagccacctcaaaatgtcttagcgttcatgggcgatgatgcgacgtggaggtacagagattggggtcttttattacaggattttacgtagtctagagcatgatacaaagctatatcccaccaacatgccgcagttaaattaggtggggtagtt

SEQ ID NO: 1227 - DNA, 389 bp, Eucalyptus grandis
  misc_feature (1)...(389): n = A,T,C or G
acattcatggggatatgcagcctccaacattcatctcagcaggcggaggaggcgctgtcccaggggctagaacagctccaacagtcactcgtcgacaccattgccggcgggcccagcatcgaaggaatgcaacagatggcaatcgccttgggcaaattaaccaatctcgaaggctttgttcgacaagctgataacttgnggcaacatacccttcatcactgncgccggatactgagagttcgacaagccgcacgcgattttttggtgatcggagagtattatggtcgactacgagcattgagtactctatgggcgtctcgtcctcgagggtgcatgatggatgatgataactcacgccaaacaacaacggacctgcaaattgttcaggt

SEQ ID NO: 1228 - DNA, 435 bp, Eucalyptus grandis
cttcaccggcactaggaatcagggcttcttggagggatttgggttctccacctcgtcgtccacgttgtcggaaactgcgaaccggggggagaactccgggagtgccggggtgttcagattgaactcgcggtgcccctgactttgcgtgagttgacgccacgccctccgagacgctcaccctgttggcagtcaaggcgacggcgacgcgacggcggctgaggagacaggagttggggcctcatagtggtacctcgtgcccaccgagagcttggccggtaggggagctcttgtggcagatcgagcactcgtggaccttcccggacataccggaggaggtggtcgtcgcggaggtcgaggtggccggctgttcgtccgcaccggcgaagagaaagtgtgttggtatagaggcgagaggagagagaagagagagaagaa

SEQ ID NO: 1229 - DNA, 252 bp, Eucalyptus grandis
gcaatccagacccagatgcggaagtgatagccttgtcgccgaagacgctcatggcgaccaaccgattcatatgcgagatctgcaacaaagggtttcaaagggaccagaacctccagctccacaggagagggcacaacctgccttggaagctgaagcaaagaccaaaggatgaaccgataaggaagaaggtgtacgtttgccccgagccgacatgcgtgcaccatgacgcgttgagagcgctcggtgatctca

SEQ ID NO: 1230 - DNA, 326 bp, Eucalyptus grandis
  misc_feature (1)...(326): n = A,T,C or G
catccatgcccgagaccggaaacgccgcaacggccgcagctccgatccccatgccggggaatttcccataccgcgcccaggagatccagtagggggggcgtccgnaagcggccctggagggggtatgcggccgagatccgagacccggagaagaagacccgantctggctcggcaccttcgacaccgccgaggaagcagcccgcgcctacgacgcggccgcccgagaattccgcggctccaatgccaagactaacttccccctcggnttccgcgccccccaggtcatggccaagaccaactcggtagatgcatcagcgagtagcgg

SEQ ID NO: 1231 - DNA, 424 bp, Eucalyptus grandis
cttcctacctcgtcagcccttcggctgttggatcaggttccgaaactgtgttcctagacttgagccttggttgcagcaatgatgagtccagcgggagggattctgtaggagtcgccttctcgagcaccagcgaatgtagcaatgagcccgaatctcatccggcagctgcaggaccaaccacttcaagagtcttttcttgcaattactgtcaaaggaagtttttcagctcacaggcactcggtggccatcagaacgcgcacaagagagagaggaccctggcaaagcgggcaatgaggatgggcatgttttcttcacagagatattccagcttggcgtctttgcctttgcacgggtctcccactgtcagggatctggggatcaaagcgcattcttccgtgcaccaggtgcaccaaggcatgttgca

SEQ ID NO: 1232 - DNA, 321 bp, Eucalyptus grandis
atgatgatgaagaaggggagcgacggagggatagcggaggtgaatcccacgccgaagaagggggtgacgtccaaggttgtggactacattgagaagctgatcgtgaagttcatgtacgactcctctctgcctcaccaatacctcgccggcaacttcgctcccgtcgccgacgagacccctcccgtcaccgacctccccgtcgtcggccatctccctgattgcttgaatggagaattcgtccgggtgggccccaatcccaagtttgccccggtcgccggataccactggtttgatggagatggcatggttcatgggatgcgg

SEQ ID NO: 1233 - DNA, 508 bp, Eucalyptus grandis
  misc_feature (1)...(508): n = A,T,C or G
gacgagatgatnatgaagaaggggagcgacggagggatagcggaggtgaatcccacgccgaagaagggggtgacgtccaaggttgtggactacattgagaagctgatcgtgaagttcatgtacgactcctctctgcctcaccaatacctcgccggcaacttcgctcccgtcgccgacgagacccctcccgtcaccgacctccccgtcgtcggccatctccctgattgcttgaatggagaattcgtccgggtgggccccaatcccaagtttgccccggtcgccggataccactggtttgatggagatggcatggttcatgggatgcggataaaaaatggcaaagctacttacgtctctcgctatgtgaggacgtcgaaacttaagcaagaggagtactatgggggagctaaatttatgaagattggagaccttaaagggctttttggtttactcatggtcaatatgcaaatgctgagagcaaaactgaaaatactagatgtttcatatg

SEQ ID NO: 1234 - DNA, 503 bp, Eucalyptus grandis; identical to SEQ ID NO: 305

SEQ ID NO: 1235 - DNA, 367 bp, Eucalyptus grandis
aaaaagtatatatacctcggcctatttgatagtgaagtagaggcagcaagggcgtatgacaaggcagctatcaaatgtaatggaagagaggctgtgaccaactttgaacctagtacgtacgatggagagatgattgcaaaagccagcaatgaaaatagcatctatggtgaccatggtcttgatctcaatctcgggatatcagcttcttccaggggaatggtggaaaccttagagccctcggacgacatgcgtcagggaagtagtttaagggtaggaaactctgctgcatcctggggtgatccatctgttgaaggtttatcgatgacatctggacaacctcctccttgacgggtgtttatcctagcgt

SEQ ID NO: 1236 - DNA, 360 bp, Eucalyptus grandis
ctccgccgtggcggtcgccgcgacaacagcaacaacctcctcctcctccacctcctcgaccgggtcggatccggcgctagaaccgagcaaaagaagcgaggattgcacttctcaaaagggcccggggaagtccccgagcccgggcgcccacccggaggagccggccggcaagaggcacaaggccgggggctccggcgagcacccgacgtaccgtggggtccgaatgcggaactggggcaagtgggtgtccgagatccgggagccgaggaagaagtcgagaatctggctcgggacgtaccccacggcggagatggccgcccgggcccacgacgtggcggcattggccataaagggcagctc

SEQ ID NO: 1237 - DNA, 539 bp, Eucalyptus grandis
  misc_feature (1)...(539): n = A,T,C or G
tctctctttctctctcctctgtgattgcagatcaggctcccacgccgttccattcgcgcatctccgacctcctctctccacgcggccactgtcccgtcgcgcgaattcaccccgccgtcgtaggagaccgcatcctacgccgccgnggcgnanggcggcgccacgaggagatgccaggggaaggaatcaattacttcctcgttactggcccaggataacagatcaagagctacaacaaatctctggagagtatccttttgttctatgtgctttgattgatttatagcaactcctagaaaggtgaattatcgcgcgtcaatagaacagggttaggatttcaatagataggatgaaaagccgggaaggttcagtttcacctctgctactaattagcattcatgatcctattccttaacttttataagctcaaactctgtaatcactcctctgtttgagaaaatgttgagtgctagtgatgcaggtaaaattggacgtttagtgctgccaagaaaatgtgccgaggcctattttccggctat

SEQ ID NO: 1238 - DNA, 520 bp, Eucalyptus grandis
tctggctgtcctgatagctttgatgaaggcagatctggaatttttgaattcaaacctctagctacatcaaacttggtccccacagaggcaaagcaccaaggaagtgaacaggctgtgaaagtttcaggtcaacgtcattctcaaccatttgcatcactgtcttcagttcagagtgatttggctgtctcatcgaaggaattgtgtctatcggtacccactcaagcggttcgctcaggggctagtccacttgctgaagctgatcctgatggattgttaggtaggaaagagcagcccaataatgtgatgcaggtgacacaactggataataaagggaatggcccttcagtcatgactgagagactctctgacgatggatataactggagaaaatatggacagaagcatgttaagggctgtgaatttccacgcagctattacaaatgtacctatcctaattgtgaggtgaaaaagcttttcgaacgtgctcctgatggacatattacagagattatctacaaag

SEQ ID NO: 1239 - DNA, 489 bp, Eucalyptus grandis
ctcagatgtgggacaagctgagggagattaaaaattcattgcttggacctgaatctgatatcagtgatagctgcaattgttgcttaaatagtgggagccaccaattcacgtcaactgggcagtgggatgtacgtcagatgatagagatgatccctaaaattggatttgaaggacatgctgattttctgtgcacaagcagttgccgaagctgacatgcctaagacagctgctttgatggaggtgttagagaggatggtgtctgtctcaggagatccaatccaacggttgggtgcttacttattagaagggcttagagcgaggttggaatcatctgggagcataatctacagaaagctcaagtgcaaagagcccactggctcggaattgatgtcttacatgtccatcctctatcagatttgtccatactggaagtttgcctacgagtcggcaaatgttgtaattggggaagctataaagtacgagtcaaga

SEQ ID NO: 1240 - DNA, 306 bp, Eucalyptus grandis
  misc_feature (1)...(306): n = A,T,C or G
gccaacgctcaccnccttggcagctgaggcagcggcggcggccgaggaggcagcagtgagggcctcgtagtggcaccgcttgtgcccgccgagagcgtggccggtggggaagctcttgtggcagatcgccggaggaggtggttgccgcggaggtctaggtggccggttgttcgtccgcgccggcgaagagaaagtgtgctggggagagagagagcgtgcagagaggtagaagagagagaagagagaggagagagaacgtgaaaggaggcagaagagagagagtgcagcgaggggagagagaggaca

SEQ ID NO: 1241 - DNA, 366 bp, Eucalyptus grandis
gagcattttcttcatccttacccaaaggattctgacaaaatcctgcttgcaaggcagacaggcttgacaagaagtcaggtctcgaattggttcatcaatgcaagagtgcgtctctggaaacctatggtcgaagaaatgtacaaagaagagattggggatgcggaaatggactccaactcatcctccgacacagccaagccaaaaacaggagatatcaagtcctccatggaggaccgggtggaagaagtgcaacagagttcaacagctacacagagatgcagctcaggccagctcatggactcatcattcgaccggactccagatgtcgaaatggcaggccactctgtgggattcaactacctgaac

SEQ ID NO: 1242 - DNA, 340 bp, Eucalyptus grandis
cttcggcctcgtcgaccaccggaatggcatgggcgtcgcgaacgccggcctcgtgtacttcgacggccacctcctcgcgatgtccgaggacgacctcccctaccacgtgcgcgtcacgcgctccggcgacctcgagaccgtcggccgctacgacttcgccggccagctcgactctccgatgatcgcccacccgaagatcgacccggcttccggcgagatgttcgccctcgtcaagtacttccgattctccaaggacggcgagaagtcccccgacgtcgagatccccctggctgagccgaccatgatgcacgatttcgcataccgaacgctttgtcgtgat

SEQ ID NO: 1243 - DNA, 684 bp, Eucalyptus grandis
ctctctctccctctcccccctaacgtttctggccctcttctttgtctggacaaaaagatgggaagaaagtgctctcgctgtgggaacataggccataactcaaggacttgcacaactttcatgggggcagcaagttcttgtgggctcaagctcttcggtgttcaacttgacctatcttcttcttctcctccttcatcatcagcatctagtggttctgctcatccttattcacttgtcataaagaagagcctcagcatggatcgtctgtcttcttcctcggcctcctcctcgtctccatcttcatccctctcctcgccaagagttcttgctgatgaacactgcaataagacctccctcggatatctctctgatggcctcgccgccagatcccaggagaaaaggaaaggagttccatggacggaagaagagcatcggacattcttaatggggctagagaagatggggaaaggcgattggagaggcatctccaggaactatgtgaccacgagaaccccaacccaagtcgcgagtcatgcgcaaaaattctttctccggcaggccagtcttaataagaagaagcggcggtccagcctcttcgacatgggtagttttcggtaaccatgtcacaaatccatacattaattgggcaccaaactcaccgaaagaaaactcagagtcttttca

SEQ ID NO: 1244 - DNA, 329 bp, Eucalyptus grandis
cggccccgcagcttggtcggcgtacctcagaaatggctcaaatggtttgtggttcctgccaaagattgatttcatatcagccaggagccaaatatgtgcaatgcttatgctgcaagacgattaactttgtgttggaagagcatctggttggacaagttaagtgtggtacatgtgcgatgttgcttatgtacccgtatggcgctccagcagtcaagtgttcggcctgccgttctgtgacagaaattggggagcacaacaaaaggaccccatgggcggtacagcaagggagacttccccctcccagtacagttccttgatgggcacacgca

SEQ ID NO: 1245 - DNA, 383 bp, Eucalyptus grandis; identical to SEQ ID NO: 279

SEQ ID NO: 1246 - DNA, 380 bp, Eucalyptus grandis; identical to SEQ ID NO: 111

SEQ ID NO: 1247 - DNA, 360 bp, Eucalyptus grandis
gcagccgagtcgagcaagaaactaacgaacgcccggtgtcattaggattcataatccacaagaacaaaagaaaaaaggatcatgggaagatccccatgttgcgaaggcaatggcctgaagaaagggccctggtcttctgaggaagacaagaagctccttgattttatccagcagcacggccatgggagctggatctctctccctaaacgtgcaggtcttaatagatgtggcaagagctgcagattgagatggataaactacttgtggccggacatcaagagagggagtttctccccggaagaagaacaaaccatcttgcatctccactccgtgctcggaaacaaatggtcggcgatcgca

SEQ ID NO: 1248 - DNA, 351 bp, Eucalyptus grandis
tttttttttttttttttttgaaagtaaacgaatttaagattaaattaaatatggggaacccagctagctagtcaagtttgaaaatgttgtgccaatttctgtttctttaatacaaagttggggaaaacaaaatttacatccgctcaaatttgaggtaaaaaaaaaccctatctcctccggctttgacttgtcagccgccctcaggttgacttgaataccaggttcatcgcaccggcgggcacaatctcctgcgacgcgggctgggagtgacgatgctccccctcgtacgtcacgatcagcatcgttggatcgtcgggggccctctccacgtgtttcctcgcggggcaccct

SEQ ID NO: 1249 - DNA, 419 bp, Eucalyptus grandis
gacgagatgatgatgaagaaggggagcgacggagggatagcggaggtgaatcccacgccgaagaagggggtgacgtccaaggttgtggactacattgagaagctgatcgtgaagttcatgtacgactcctctctgcctcaccaatacctcgccggcaacttcgctcccgtcgccgacgagacccctcccgtcaccgacctccccgtcgtcggccatctccctgattgcttgaatggagaattcgtccgggtgggccccaatcccaagtttgccccggtcgccggataccactggtttgatggagatggcatggttcatgggatgcggataaaaaatggcaaagctacttacgtctctcgctatgtgaggacgtcgaaacttaagcaagaggagtactatgggggagctaaatttatgaa

SEQ ID NO: 1250 - DNA, 632 bp, Eucalyptus grandis
ccccccgcgacgaccggacggccagtccagattccctcgccgtcgccgccgtgaaacgccggagcgcacggcgcacggacccgacggacgccgtcctccgccaccgtcgccgaggttgagagccatgtcgagcgacgcgcgcgccgcctccggcgccaccgccgccggcgccggggagttcatgctgttcggggtcagggtggtggtggtggaccccatgaggaagagcgtgagcctgaacaacctgtcggagtacgagcagccccaggacgcggcccccggcggcggcggcgtcggcaaggacgacgcgggagcggccgcctccggctacgcgtccgccgacgaagccgtcgcgcacggctcgaaaggcgggccggccgcgagcgcaagcgaggagtcccgtggacggaggatgaacaccggctgttcctgctcgggctacagaaagtaggaaagggcgattggagaggcatttcgaagaactttgtgaagactcggacgccgacccaggtcgcgagtcatgcccaaaaatactttctccgccggagcaaccttaatcggccgtccgccgccggacttagccttgtttgacatcaccacccgatacggtcactggttggtacaatgatgga

SEQ ID NO: 1251 - DNA, 202 bp, Eucalyptus grandis
atgcgaaacatgctcaaacacccccaacatcatgggaaggtggaagtggggctgattcggaggttaacatgttgaaggattacgcttcagaggactggattacaggtgttgaccgcttccggttgagcttggttgaatttcttgataagttgaataagtatgcggagtcctctgttcatatgtacgtgtcccttgaaaaggc

SEQ ID NO: 1252 - DNA, 378 bp, Eucalyptus grandis
gagataaagaactactggaatacaagaattaagcgactgcaacgcactggcatgcctatatatccaactgaggtttgtctgcaagtgtcaagtgagaatcaagaaactcataacatgggtaacttgcatactgcaggcgaagataattgtgatctctcacaggcagatccactcgagatcccagaggtggattttagaaaactggaactgcatcttggtttctcgtctttttggtctacacttctggacgttcctccttgtggctttgggagagaggcaatgtgtctatctgatgcttactgccttccatttccatcaagccggtctcctaaacgccttcggggttctgagaccccatttcctgtcttggatgctgga

SEQ ID NO: 1253 - DNA, 388 bp, Eucalyptus grandis
gtgattttagtgctcgatactttgaaaagggcatcaatacagtcaaacgagataaaaagacataacatgcaaaactcaatacatgattctcagaaaagaccatcatctttaattcagtcaaacgaggctgtttttacgcaaacttcggtcataagctgtgccttgcaatcgtttgttaaacctccaaatgctaaggtcacggtcacattcctctctgatctttgagcagctcatggcaccaacgtccaaggaacatttcttaaaaaggatgatccaaaagttactgctctgattcaacaagccgagctgctcagttcccttgcggtgaaagtcaatgcagataacatggaccagagtcttgaaaatgcttggaagggtctccaggaat

SEQ ID NO: 1254 - DNA, 380 bp, Eucalyptus grandis
cgacgatcgggtcgggtcggttcgggcgtcgccatgacgcggcggtgctcccactgcagccacaacggccacaactcccggacctgccccgcccgcggcggcggcggcggcggcgggggaggcggcgtgaggctcttctgggtgaggctgacggacggctcgatcatcaagaagagcgccagcaccagcagcctctcgtcccaccacctcctccccccctcctcctcgccgtcgccttcgccttcgccgtcgccgtcgccggccgcgggctcgccgccgtcgggcgaccaccactacgaccaccaccaccaccagcagcgcgacccggacgggtacttgtccgacgatcccgcgcaaggggcctgcgcgtccgatcgccg

SEQ ID NO: 1255 - DNA, 350 bp, Eucalyptus grandis; identical to SEQ ID NO: 113

SEQ ID NO: 1256 - DNA, 377 bp, Eucalyptus grandis
tctcaatgggattagcggaaagaagaaccaccagagggaggattcagaatttgaagatgagaggagtaacaagcagacagcagtgtatgttgatgacaccgagctatccgagatgatggataaattgttggtctgtcatattaaaggcaagagtcgagattcaaatgctgatgaatcctctaaaaaagaagtaagtaaatctttacagcagaatagacagacacacactgctgatggtgggaagtttcataataagaaaccaaccccaaccagcaatatgacagagatggtggatctcagaactttgttgatcctttgtgcacaagctgtctcttctgacgatcgaaggactgctaatgactatctaaggcagattc

SEQ ID NO: 1257 - DNA, 651 bp, Eucalyptus grandis
actcgtggcgctgtttcgagctttctagcttccggaggaggagggctggtgttgagcgaaacttggagaggtcatgaattcgacaaccactcagtttgtgtcctctagaaggatggggatgtatgacccgattcaccaaattggaatgtgggacgagaacttcaagcagaatggaaatcctaatgcgccgccagctctgatcatacctatgcacgcgaatttggacaaccagtcggaggatacttctcatggatcacaggatactgctggcaagtatgagcaagaaacatcgaaaccttatgataaggtgcaaagacgtcttgcccaaaaccgtgaggctgcgcgcaaaagccgtctgcggaaaaaggcttatgttcagcagctagaagcaagtcgtttgaagcttatgcagttagaacaagaggttgaccgagctaggcaacagggtgtgtacatggcttcaggagtagattcagcttatccaggatatggtggatgtttaaattcaggaatcgttgcatttgagatggagtacgggcactggattgatgaacagaatagacaaatatgtgagctgagggctgctttgaatgatcatagaactgacgtagagcttcgcatcctcgtggaaagtggcatgaaccactattc

SEQ ID NO: 1258 - DNA, 311 bp, Eucalyptus grandis
gacgagatgatgatgaagaaggggagcgacggagggatagcggaggtgaatcccacgccgagaagggggtgacgtccaaggttgtggactacattgagaagctgatcgtgaagttcatgtacgactcctctctgcctcaccaatacctcgccggcaacttcgctcccgtcgccgacgagacccctcccgtcaccgacctccccgtcgtcggccatctccctgattgcttgaatggagaattcgtccgggtgggccccaatcccaagtttgccccggtcgccggataccactggtttgatggagatggcatg

SEQ ID NO: 1259 - DNA, 588 bp, Eucalyptus grandis; identical to SEQ ID NO: 325

SEQ ID NO: 1260 - DNA, 620 bp, Eucalyptus grandis
tgaaaatcgtattgtcctctttcgtcttgatgcgttgaagaactaaaagaaggagccacaaacactgaggaataaaccttagaactaccaaataaggagagcccacgggactcgttttcttgtatgccacaacggtccgaaccttcttttggtgaggccggggagcaaactatcgtttcttcgacgagggtattgacatccttcgaaccacctgcactcctcctgttccgatccggccatggatgattgagaaaagagttgagaactgatgacgatgacgatcttgcttgttgctgcttcatatttgcatgctggagaatctggtcgactttcggatgctgccctacgaagctgcagttcacctcggggtgattaccgatcagctggtggcacgggaagttcgtcttcgcgttcctccctcggagaagccaggccgcgctgtcgtaagccaaggcggcttcctcggcgctattgaaagtgcccagccacagcctcagcttcagcgtggagtccttgatctcggcgacccatcttcccgaaggcctttgtctcaccccgagaaaccttctcattgcatcatcacccttcgctcttctcttgatgttcttcctcatggctat

SEQ ID NO: 1261 - DNA, 562 bp, Eucalyptus grandis
gataaatcgtcttcaccagtacctccgcaggatcagacgggtgttcatgtttatcatcctgattgggctgctatgcatgcatactatggtccaagagttgctcttccgccttattataattctgctgtatcatctggtcatggtcctcatccctacatgtgggggccaccacagcctatgatgccaccatatgggccaccttatgctgcaatatactcacatggaggtgtttatggacatcctgcaattcctcttactccgactcccttggctgcggaaactcctaaaaagtcatctgctaattctgataatggactggtgaagaagttgaaaagttttgaagggcttgcaatgtcaataggcagtgggggggatgcagacagtgctgacgatgggactgataaaaggtcatcacagagtgcagactcgggagactcaagtgatgaggatcaatcaggggcagataaagccaggaggaaaagaagccgtgaaggaacttcatccaatggcgatggaaaatctgaagtgcaaggaaaggctgctggggaggtggatgctgttt

SEQ ID NO: 1262 - DNA, 384 bp, Eucalyptus grandis
gacgagatgatgatgaagaaggggagcgacggagggatagcggaggtgaatcccacgccgaagaagggggtgacgtccaaggttgtggactacattgagaagctgatcgtgaagttcatgtacgactcctctctgcctcaccaatacctcgccggcaacttcgctcccgtcgccgacgagacccctcccgtcaccgacctccccgtcgtcggccatctccctgattgcttgaatggagaattcgtccgggtgggccccaatcccaagtttgccccggtcgccggataccactggtttgatggagatggcatggttcatgggatgcggataaaaaatggcaaagctacttacgtctctcctatgtgaggacgtcgaaacttaagc

SEQ ID NO: 1263 - DNA, 381 bp, Eucalyptus grandis
ccgcgccactccattcgcgcatctccgacctcctctctccacgcggccactgtcccgtcgcgcgaattcgccccgccgtcgtaggagaccgcatcctccgccgccgcggcgatggccccagcttcattccctgcgctagcaacgcatttcaatggaagtatgctaatgatactaactcatctggtgaaagtcacacacgtaatggaaggccacgaggagatgccaggggaaggaatcaattacttcctcgttactggcccaggataacagatcaagagctacaacaaatctcaggagactcgaactctgtaatcactcctctgtttgagaaaatgttgagtgctagtgatgcaggtaaaattggacgtttagtgctgccaa

SEQ ID NO: 1264 - DNA, 316 bp, Eucalyptus grandis
ccgagaagaggacccccaagaagagagggaggaagccaggcctcggccgcgacacgccgctgaaccacgtggaagccgaacggcagcgccgggagaagctgaaccaccgcttctatgcgctgcgagcggtggtcccgaacgtgtccaggatggacaaggcgtccctgctctccgacgcggtgtcctacatcaacgagctcaagtccaagatcggcgatctggagtcccagttgcagagagagtccaagagggtcaaacaggaggtcaccgacgcaaccgacaacctgagcaccaccacctccgtcgaccatagtag

SEQ ID NO: 1265 - DNA, 356 bp, Eucalyptus grandis
tcaggctcccacgccgttccattcgcgcatctccgacctcctctctccacgcggccactgtcccgtcgcgcgaattcaccccgccgtcgtaggagaccgcatcctacgccgccgcggcgatggcggcgccacgaggagatgccaggggaaggaatcaattacttcctcgttactggcccaggataacagatcaagagctacaacaaatcttggagactcaaactctgtaatcactcctctgtttgagaaaatgttgagtgctagtgatgcaggtaaaattggacgtttagtgctgccaagaaaatgtgccgaggcctattttccgcctatttcccagcctgaaggattgccgctca

SEQ ID NO: 1266 - DNA, 360 bp, Eucalyptus grandis
gcgcgcacgagacatgggacgatccccttgctgcgagaaggcgcacaccaacaagggcgcgtggaccaaggaagaggaccagcgcctcatcgactacatccgcctccacggcgaaggttgctggcgctccctccccaaatctgccgggcttctcaggtgcggcaagagctgcaggctcaggtggataaactacctccgccccgacctcaacgcggcaacttcaccgaggaagaagacgagctcatcatcaagctccacagcttgctcggcaacaagtggtctctgatcgcggggagattgcccggaagaaccgacaacgagatcaagaactactggaacacccacatcaagcgcaaagct

SEQ ID NO: 1267 - DNA, 375 bp, Eucalyptus grandis
cgcccacccctcctcgcagcccagcgctgccgctcacttcagtcaaggggtaccctgcccgcaacagcatttccgagtatgacccgcgaaggcgtaactcaattcccgcagaatactttactatgggctttactccctctgctcccatttaccctcccatctctccactgcacccgtccacacaactccctgctgtgacgcaggctcggccctcgggtgagtccaaaggggacccaagaaagaagtaccaatgtgccgcctgcccgcgtgcatttgccagggcttacaatttaaagacccacatggcaacgcatgaccccaacaggctgaagccccatgtctgcccccatcgttcttgcggccgttccttcagca

SEQ ID NO: 1268 - DNA, 567 bp, Eucalyptus grandis
gacgagatgatgatgaagaaggggagcgacggagggatagcggaggtgaatcccacgccgaagaagggggtgacgtccaaggttgtggactacattgagaagctgatcgtgaagttcatgtacgactcctctctgcctcaccaatacctcgccggcaacttcgctcccgtcgccgacgagacccctcccgtcaccgacctccccgtcgtcggccatctccctgattgcttgaatggagaattcgtccgggtgggccccaatcccaagtttgccccggtcgccggataccactggtttgatggagatggcatggttcatgggatgcggataaaaaatggcaaagctacttacgtctctcgctatgtgaggacgtcgaaacttaagcaagaggagtactatgggggagctaaatttatgaagattggagaccttaaagggctttttggtttactcatggtcaatatgcaaatgctgagagcaaaactgaaaatactagatgtttcatatggaacagggacaggcaatactgcactcgtatatcaccatggaaaactgttggcgctttca

SEQ ID NO: 1269 - DNA, 567 bp, Eucalyptus grandis
tcgccacctaatgcatgcactgaatctgcagttgccaccattagacccaaaacggtgaggtttaagccagtgccaaatcgagctccaactgcagtgaattcatcccaggcagaagtctctggaacagcaaccggcaattccaatgataaggctttaaagtcagatgaaaagcctaccgtaatatacaaaccattggcaaagcttgtctcaaggtcaaccgtctcgctcttggctaatatgggaagcttcaatatggctcaccatcaaacattgtcagttgccgaagcacgtgttaaatctcaactgcaggacaaaaacaattcgagatcccagcctattggaaatctccatcggagtgtctcttcacaagcagatatggatgggacaagtgaacccttgagattggcctcccagaacatggaagaagacacgagaacttcaccggccttgaacatggatcgcccttcttacgatggatataattggagaaaatatgggcaaaagcaagtcaagggaagcgaatatcctagaagttactataaatgcacacacccaaactgcccggtg

SEQ ID NO: 1270 - DNA, 325 bp, Eucalyptus grandis
gcggggtgtacgtccggaacggcgccaacccgctccacgagccggtcgccgggcaccacttgttcgacggcgacggcatgatccacgccgtccggttctccggcggctcagtgagctacgcctgccggttcaccgagacgcaacgcctgatccaggaacggggcctcggccgccccgtcttccccaaggccatcggcgagctccacggccactccggcatcgcgcggctcatgctcttctacgcccgcggcctcttcggcctcgtcgaccaccgtaatggcatgggcgtcgcgaacgcgggcctcgtgtacttcgacggccacct

SEQ ID NO: 1271 - DNA, 365 bp, Eucalyptus grandis
cacaggcgcgatcgggccaagcgagcgtcccccccgggaattcagaacccagccgccgcgccccgccgccggcagccgccgtctccggcgcccctctccggcacctccgacgccgcccgcgtccggagcaccctcgacccttcgattcggaggctggttcgctgaggctcgaggcgacgcgaattgttatcgatagctatgcagagtcaacttgtctgtaatggctgtcgaagcattcttctttatccaagaggggctacaaatgtttgctgtgcattatgtaacacaataacctctgttccttctcctgcatatgtaggtgcagatatggcccagcttatatgtggaggttgcaggacactgct

SEQ ID NO: 1272 - DNA, 365 bp, Eucalyptus grandis
accgtgcccgcgatgcaacagcatggataccaagttctgttactacaacaactacaacctgaatcagcccaggcacctctgcagaaagtgccaacggtactggactgccggaggaacgatgaggaacatccctgttggcgctggccgtcgtaagagcaagaattcgtatgcagccacggtggcactgtttcacaacacgggagtacctgaatctcttcgagctgattgtgctggtgatttgaaaaccgccggaaccaccatcctgaggttcggttcagattctcctaattggggtcaatctgcagctccagtgccaagtactataaacggatttcttgatcctggacgaacaattccatgttctg

SEQ ID NO: 1273 - DNA, 328 bp, Eucalyptus grandis
  misc_feature (1)...(328): n = A,T,C or G
aacaaatcagnggaagaaaatatgcagcatttgaaggacgaagctgcgaacatgatgaagaagatcgagctcctggaagattcaagaaggaagctccttggtgaaggtctaggatcatgctcgatagaggaactgcaacagatagaacagcagctagaacggagtgttatcagcattcgtgctagaaagactcaggtcttcaaggagcagattgacaagcttaaagagaaggagaagatgttgacagctgagaatgcaatcttaactgagaagtgtggaatcaagcccccacaaagagcaaatgagtgcagggatagtccacttctca

SEQ ID NO: 1274 - DNA, 390 bp, Eucalyptus grandis
cttaccgagcactcccctcctgattctaactcgtccattttcgttggtagcagtacatcattggctaataagcctaaatacagagatatccaagcaagagaagccacaagtggttcatcccgccaacactcagatgaagatgatgctgcgacagtggcagatccaagcgaacagagcagatatcctactgatcccaagcgaattagaaggatggtttccaatagggagtctgctagaaaatcacgtaaaaggaaacaagcacacttagccgaacttgaaatacaggctgaccgacttagaggagaaagttctactttgtttaagcaactattagatgctgcacagcactaccgccatgctgatacaaataatcgagtgctgaaatctgat

SEQ ID NO: 1275 - DNA, 384 bp, Eucalyptus grandis
gaattacacccaaccaaaccaaaagagtcataattcaggatccaccttgtttagttaagcaagaataattttcccttcccttttctctttttgagccctttagagttacatgtcttgggtagcaatgacggggaactttgggtggggctcaaactccatggaagaggcgtggaggaaaggtccctggactgctgaggaagacaagttactcattgagtatgtgaagttgcatggggaaggaagatggaactctgtagctaggctcacagggctcaagaggaatgggaagagctgtagattgaggtgggtgaattacttgaggcctgacctgaagagaggtcagataacccctcaagaagagagcgtcatcctagactcccgcta

SEQ ID NO: 1276 - DNA, 382 bp, Eucalyptus grandis
gtcgaccgagtggaagagaggttggcccctccgatctggtcaactcgccaccctctgcgataagtgcgggtctgcatttgaacaggccacgttttgcgaagttttccactcgaaggactccggatggagggagtgcgcttcctgtggcaagcgcctgcattgcggatgcattgcttcgaggatgctgctggagctgctcgattgtggcgggatcaactgcgcgacctgtgcgaaaagttcaggacttctgcctatcgcaagtgatgagaggcctagtgagtttggcatgattaatgttcgtactggtgaactgcaatctagtaccacagacaaccatttcgatagcgacgaggttgataaactgaagcttattcgattgaga

SEQ ID NO: 1277 - DNA, 367 bp, Eucalyptus grandis
ataagatcggatctttcctgctttggcgacgccggaaacccgaattcagtgcccaaacagtagtcgaccgaccgaccgaccgaccgggaagttccgatcatggccgtggagatgtttcaagagccggagtcggcgttcctcgactccgtccggcggtacctgctgtcggaggactccgagtgccggttcttcgagccgccgccgccgccgacccggaacttctgcggcgccggagccccggtgatctgcgggagctccagcttcagcagcctgtacccgtgcctgaccgagaactggggcgagttgccgctcaaagaagatgacccggaagacatggtcctctacggcgtctccgcgacgccctcac

SEQ ID NO: 1278 - DNA, 384 bp, Eucalyptus grandis
  misc_feature (1)...(384): n = A,T,C or G
cacgctcatcggtctgccagaaactcacggagagagagagatggcggagagagaggagaaggggaagtacgacgagatgatgatgaagaaggggagcgacggagggatagcggaggtgaatcccacgccgaagaagggggtgacgtccaaggttgtggactacattgagaagctgatcgtgaagttcatgtacgactcctctctgcctcaccaatacctcgccggcaacttcgntcccgtcgccgacgagacccctcccgtcaccgacctccccgtcgtcggccatctccctgattgcttgaatggagaattcgtccgggtgggccccaatcccaagtttgccccggtcgccggataccactggtttgatggagaaggcatggt

SEQ ID NO: 1279 - DNA, 368 bp, Eucalyptus grandis
cacggcggcgccgccgggtttcttgggccgagggccgtgccgatgaaacaggcaggtctcgcccagaagcccacgaagctgtaccggggagtgaggcagaggcactgggggaagtgggtggccgagatccggctacccaagaaccgcacccgcctctggctcggcaccttcgacacggccgaggaggccgccctcgcctacgacaaggcggcgtaccggctgcggggtgatttcgcgcggctcaacttcccgcacctcaagcacaaggggtcgcacatccagggcgacttcggcgactacaagccgctccattcctccgtggacgccaagctccaggccatctgccaggacatggccgagaaaccagc

SEQ ID NO: 1280 - DNA, 341 bp, Eucalyptus grandis; identical to SEQ ID NO: 267

SEQ ID NO: 1281 - DNA, 295 bp, Eucalyptus grandis
tgactttcaatgagtttcagaacacatggagtggactttctaaggatattggatccatcaacatggatgagttcctgaagaacatatggacagctgaggagagccaactacagctacaagacatggcgccttctggtaatggaggggaaggaggtggtcaagtagggaatttgctgagacaggggtcattgactctgtcgcggactattagtcaaaaaacagttgatgaagtgtggagagaattattcaaagagacggaggatgtgaaagaagggagtagagaaggaggtgacat

SEQ ID NO: 1282 - DNA, 365 bp, Eucalyptus grandis
  misc_feature (1)...(365): n = A,T,C or G
ttttttttttttttcaagctaagatcaaaccaaaattaaaaaagaatttcacagtatttttatgcaaatgcaatgacaccttatcaaggtttaccaaatgttgaaacaaattatacacacggcctgaggcatccatgaaatcacgcaggcaaaacccgcggctcattttcacgactgcctacctgctcgcgggggttattcaaagcctcgaataccttagtgcaagcacctgagaattccatcaatgccttaaaaacgcgaggcaggccgttcttgagggggttcagtgccatggccttggtgaactcgaccgaaaccgcatacttggcnttcacatcgtccaaccgttttttnagggcctcgat

SEQ ID NO: 1283 - DNA, 428 bp, Eucalyptus grandis
ctccggcgagctcaaactgttcatgaccacgtcgccgtcctcgtaatccttcgcactgatctcttcgccgccaccgcctgccccctcggcctcctccacttcctcccctgcttccccattgccaaacgccctcgccgcctctgccgccgctgcctgtatctctgctgcgtccgtggactccggcacgcggagccgccatgccgagtcggcgaaattgaggcacgcgccccgcccgcggagcgccagcgcagccacgtcgtgggcccgggcggccatctcgggggtcgggtacgtcccgagccatatccgggtcttcttgttgggctcccggagctcgcacacccacttgccgttgttcctgcgccggaccccccggtacacggggtggcgggtctccttgaacacgacccgcccggcccgcttcttcg

SEQ ID NO: 1284 - DNA, 532 bp, Eucalyptus grandis
ggaaaagagaaggcagctttcccgtataaaacccaaacccctccaaattctccccccaattctccagccagggaagggcgagggcggcgacggcgacggcgacgatcatcccatctccgaccagctgatccttccgctccatcgtcgtcatgtacggacgggcggcggagtggagccgctacgaggacaaggtcttcgagcacgcgctggtggcggtggcggaggactcgcccgaccggtggcagctgatcgggaaccgcctgaaccggtccgcgtcgcaagtgttcgagcactaccagaggctggtggaggacattgacgcgatcgagtcggggcgggtcgagccgccgagctaccgcgacgaccacccggcgagctgcggccagattgccttcgagacgaagccccggatcaaggaggcggagaagaagaagggcaacccgtggaccgaggaggagcacaggttatttttgctcgggctgcagacctatggcaagggcgactggaggagcatctcgaggcactttgtcct

SEQ ID NO: 1285 - DNA, 349 bp, Eucalyptus grandis
aaagtcccgagatgccgcgacgcgaattcccctctcgaatgcgctcggaattcgagcgatgatcggagcggcgaccaaccagatcccgccgccgccgccgccgccgcagccgcagcaagccgcgcccgccgccgccgcgatccggttccccgactccgtctacaacgcgctcagggtgggcgccgtcttccagcggctgtcgaagcacctcgccaccatcggcaagggctccggcctgtcggcatcttgcggtacttccatggagttcctgaactcgtgcctctgcctcgccagaggcattgactatgcggtcgcgaacaatgaggttctgcccaaagctcacgaattg

SEQ ID NO: 1286 - DNA, 350 bp, Eucalyptus grandis
cttctgcgagctagggtttctctcgctcctcctcctctctaggccgtgatttctcctcccctcgatcggcgacgtcgccgtcggttcggctctccggtagctcctgctcctcccggctttcatggaggctaaggtgatggaagacgctagcaagtccgaggctcactccatatcggctgcggccttcgtggaaggtggagtccaagaggcctgcgaggatgcttgcagcatctgccttgaagctttctgcgacagcgaaccatctacggtgaccacttgcaagcacgagtatcatctccagtgcattctcgagtggtgtcagaggagttcacagtgtcccatgtgttggc

SEQ ID NO: 1287 - DNA, 344 bp, Eucalyptus grandis
gaaggttggaacatctggtggagcaggcccttgtcctgcaaacagatgcatgtatgcttcataactctatagatatggaaatgtcactgtacactgatcatcaatgtggtaaagaacacatcccctgtcgaactttgcagattttacaatcacataatgatgaagtttggcttgtgcaattttcacataatgggaaatatttagcttctgcatccaatgatcgatcagcaatcatttgggaggttgatgagaatggcagcgtctcattgaagcataaattgactggtcaccagaagccgatttcttctgtctgttggagtccagatgaccgacagcttctcact

SEQ ID NO: 1288 - DNA, 359 bp, Eucalyptus grandis
aacatcttctggctaagcgcgttcagcatcactctcaactactggcgtgaagatgttcaaaggcaaactttcttatctcagaggctaaaagatgttccacccatggcttcttaatctgatccagatgaaccgtggagaaacaaaatcgaagtctcatcaaaaggatcctgattgacctaagaatgacaaggcaaccattcttacggacaaaatccaggtgctgaaggatttaactacggaagttaacaaattgaaagctgaatgtgcagctcttattgaagaatctcgtgagctgatgcaggagaagaatgagctcagagaagagaaatcatctttaaaatctgaagttgaaaatctta

SEQ ID NO: 1289 - DNA, 381 bp, Eucalyptus grandis
tggatccaaagaattcggcacgaggctgcctccaccaccaccgccgtccccaccgccgccaccaccaccaccaccaccaccaccaccttatactgtacaaataatcccttggcctcggccgttatagcctcttactcaaaaatcagtttttacccttttctgttgcgtagtcgtagttttgggccaggggttctattcggtatatgtagagaagtcagtgggcgaaaccgagcgtcgagcggtcggccatggcttcctcttcttctgtagcttccgcgaggaaggacgcggatcggatcaaggggccgtggagccccgaggaggacgaggcgctgcagaggctggtccagagctacggcccccgcaactggtccctgatca

SEQ ID NO: 1290 - DNA, 330 bp, Eucalyptus grandis
ttccaatcttcccttcccttcccatcgcacctctccaaagattccacctttcgtctctctctctcgaagcccaaaccctctcgatctatattgccctcctctcctccgttcatccctcgcaaaaccagacccccggatcagccccgaaagaaggtcggacaagcaagatggcggaagagcaccggtgccaggccccgcgcctctgcgcgaacaactgcggcttcttcggcagccccgcgacgcaggatttctgctccaagtgctaccgcgacctccagctcaaggagcagcagtcctccaacgccaagctcgctttcaaccagaccctgt

SEQ ID NO: 1291 - DNA, 296 bp, Eucalyptus grandis
gcagccgagtcgagcaagaaactaacgaacgcccggtgtcattaggattcataatccacaagaacaaaagaaaaaaggatcatgggaagatccccatgttgcgaaggcaatggcctgaagaaagggccctggtcttctgaggaagacaagaagctccttgattttatccagcagcacggccatggagctggatctctctccctaaacgtgcaggtcttaatagatgtggcaagagctgcagattgagatggataaactacttgtggccggacatcaagagagggagtttctccccg

SEQ ID NO: 1292 - DNA, 355 bp, Eucalyptus grandis
  misc_feature (1)...(355): n = A,T,C or G
gccaagaccctggccggccacaaggccgccatctccgccgtcaagttctcgccggacggcaacctcctggcctcctcctccgccgacaagaccctccgcgcctactccaccgcctccctcgccccgctccacgacttccacggccactcccagggcgtctccgacctggccttctccggcgacacccgcctcctcgccncgcctccgacgacaagaccctccgcctctgggacgtccccacggggaccctcctcaagaccctcacggccacaccaactacgccttctgcgtcaacttcaacccccactccaacctcctcgtctccggctccttcgacgagaccgtcccgcgtctg

SEQ ID NO: 1293 - DNA, 362 bp, Eucalyptus grandis
cccctctaccccccaagccccccaagccgtcctcgtccaccctcagctcccgccgcccggccatccaagtcgcggtccccgcggcgacgagcttcctggcggcgccggctgtcccccgggccgagccgtcgggctccgctggcggcgacgacgacaagcactaccggggcgtgcgccggcggcgtgggggaagttcgcggcggagatacgcgacccgacgcgcaaggggacgcgcgtgtggctggggacgttcgacacggcggtggaggccgcgaaggcctacgaccgcgccgcgtttaggctccgcgggagcaaggccatcctgaacttcccgctcgaggcgggacgcgacgagccgacgt

SEQ ID NO: 1294 - DNA, 360 bp, Eucalyptus grandis
ctctgccgaaccggagaggggccgacaaatgaaaaggaggcggaggaggagatgacgatgccgatgccgatgccgatgatggaccggattagcccgtagagaggaatcggattgctttgccggaacaagagatttcgcgacgacgacgacgacgacgacgacgaatagggaggaaaaagatgcggacgatctgcgacgtgtgcgagaatgctgccgcgatcttcttctgcgccgccgacgaggccgctctgtgccgcgcttgcgacgagaaggttcatctgtgcaacaagctggcgagtcggcatgtgcgcgtcgggctcgccgatcctagtgaggtccaacgttgcgatatatgtgaga

SEQ ID NO: 1295 - DNA, 344 bp, Eucalyptus grandis
cgtctcctccgtcaccctctccctcttcttcctcttctacaagcaccggtcccactatgctggcccgaacctccccccgggcagcatcggcctcccgttcatcggcgaaagcctcgacttcctctccaccgggtggaagggccacccggagcggttcatcttcgaccggatcgcccgctactcctcccacgtcttcaagacttccctcctcggggagccggccgccatcttctgcggcgccgccggcaacaagttcctcttctccaacgagaacaagctggtggtctcgtggtggcctaactccgtcaacaaggtcttcccttcctccacccagacctcctcca

SEQ ID NO: 1296 - DNA, 287 bp, Eucalyptus grandis
gttactacgagagacaaaccaactttgctcctcgtccatccaagattgccaaccctggtgcccttggtctgttctcctttgcatcgacgacgttcattctctccctctacaacgtcaatgcgcgtgacgtaaccacccccaatgttgtgttggcatggccatcttctgtggaggccttgctcagctcctcgctggcatgtgggagtttcctcgcggcaacacctttggagcaacggctttttcctcatatggcgcattttggatgtcgtttgctacgatttatatcc

SEQ ID NO: 1297 - DNA, 557 bp, Eucalyptus grandis
  misc_feature (1)...(557): n = A,T,C or G
ctctctccctctctctctctccctctgcaagtgctggctgctcagatggctgaagcgagagcacatgggttcgtctacgccagcaagaagaggccggggtccgatgatgccgatggcggcgaggacgcgatggtggtggccaagaaacagatgatctccggccccgtggcgggggtgtgggaggacccagcggaatgtccgccatatcatcggtgctgatgcagctgtgcagcagcggcggacacatcgtggcgtcccaggcgctgtacggcgggacccacgccctcctgacccacttcctcccgagggcgtgcaacatcacgacgacgttcgtggacatccgggaccacgccgcggtggcggccgccgtggtccagggccggaccaaggtgctctacttcgagtccgtctcgaacccgacgctgaccgtcgccgacataccggagctctgccggctggcccacgacaagggcgtgacggtggtcgtngacaacacgttcgcgccgatggtcctgtccccggcccggctcggcgccgacgtggtggtgcacaacatc

SEQ ID NO: 1298 - DNA, 500 bp, Eucalyptus grandis
  misc_feature (1)...(500): n = A,T,C or G
gggcatactaaggcaatcgattctgtgtgttgggattctactggcgatttaattgcgtctgtcagtgaggactctgttagagtttgggcagttgggtctggtagtgaatgggactgtgtacatgaattgagctgcaatggaaacaaggcccactcctgcgtgttccacccaacttatccttcacttttggtgattggctgctaccanaccctggagctctggaatatggccgagaacaagacaatggctttgccagctcatgacggactaatttcagcattagcagtatcaaatgtgacgggcctggttgcttcagctagtcacgacaagacagtgaagctgtggaagtgatactttggcatctccaggtatttttcctaagcactcagattggaagactgaaatcgctgttcccatcaaagtgcatgtatcttgtccttgtatcaagttgcctcagtacgcccagttggtgtccgtctcactgatactaatttatagct

SEQ ID NO: 1299 - DNA, 444 bp, Eucalyptus grandis
gagacacaccccgcaatctaccggaggcgccacgaccttgtgagcgcacgggcttgctcgttcgatcttgagtcatgaggctcctgtgcctgctcgcgttgatcccgctcgtcgcagcggagtgcacgtgcgagagcgatcccgaggaacgcaacaggacccgggccctcaagtacaagctggccgccatcgcatcgatcctcgtggcgggcgcggttggggtgtgcctcccgatcgtggggaagaccgtcccggctctgcacccggagaggagtatcttcttcatcatcaaggccttcgcggccggggtgatcctgtccaccgggttcatacacgtcctcccggacgccttcgagaacttgacgtcgccgtgcctgagcgagaccccgtggggggatttcccgttcgcggggttcgtggccatgctcggcgcactcgggacgt

SEQ ID NO: 1300 - DNA, 547 bp, Eucalyptus grandis
ggaagctctagggttgtgaagtacattctcgaatctggcaaagtcgatgtaaatagggcttgtggttcggacaaggtcactgcccttcactgtgctgttgccagtggctctgcttctgcggtggaggttgtcaagctcttgcttcacgcatctgccgatgctaattgcattgatggcaatggaaagaagccaattgatgtgatagcccttccattaaagtcacgcggcgattcaaggaggaagctgatggagctgttgctgaaaggcgataattctgatggggaatttgaatcccacgaggagaagccgattgccgcaccgcaagcatccaaagagggaagcgaaaagaaagagtatcaatttcctgttgatatctctctgcctgacataaatgttgggatttacagtactgatgagttcagaatgtatgctttcaaagtaaagccttgctcgcgggcatactcccatgactggacagagtgcccatttgttcatcctggcgagaatgcgaagaggcgggaccctccaagtacccctacaactgcgt

SEQ ID NO: 1301 - DNA, 483 bp, Eucalyptus grandis
cttcgagtttctttcttcactagaattcgctcccgagtctgttgttgctcgtgtagttttgcttactccgtccttcgtttagctcgctgaccagcgcggagctaggagcggtcgctaaaggattactcgtacaaaacgtaaactcagctctgccaattttcccatggagggggaatcttacttcgagaaagatgaaaaatattctaattgctcaatcttgctcgaattatctgcttcggacgatctcccagcttttgaaaggaaagcgaaagagaagggctgtaacattgatggtgctagcttctggtacggtagaagaattggctcaaggaagatgggtcttgaagagaggactcctctcatggtggcttccttgtttggaagctctagggttgtgaagtacattctcgaatctggcaaagtcgatgtaaatagggcttgtggttcggacaaggtcactgcccttcactgtgctgttgccag

SEQ ID NO: 1302 - DNA, 368 bp, Eucalyptus grandis
ctttcttttgcttcccgttaatccctatttcgttatcaacactttaaaagtcggtgaacagtttaaaattggaatgcatcggaagtagtagttcgacaatttcaactttcaggtgctttttgggaaaaaaattcaatatgagaagatgggtaaaatttgttgcaattcattttcagggatgctgcggtggtttgcattttggcgacgtgcttgttcttaatcttgacagtatggtttggagaactcttgcgaccaccggccaaggacctggcccgagggacagtcacagtgctgttcttgtggggcacaggatggttgtgtttgggggtaccaacggctctagaaaggttaatgaccttcatgtactg

SEQ ID NO: 1303 - DNA, 348 bp, Eucalyptus grandis
ccgagctggtgatgtcgtccggcctcgtctgcaacgacgccgtcagctgggtcacgttccacagcgcctacgacttcgggtacctggtcaaggccctcacccgccgcgagctccccggcgacctcccggagttcctcgccgtcgtgcgggtgttcttcggggaccgggtgtacgacgtgaagcacctcatgcggttctgccacagcctgcacggcgggctggaccgggtcgccgccgccctggagctggaccgggcggtcggcaagtgccaccaggccggttccgacagcttgctgacgtggcaagcgttcaggaagattagggacgtctacttcgccaacgacgacg

SEQ ID NO: 1304 - DNA, 349 bp, Eucalyptus grandis
tgactttcaatgagtttcagaacacatggagtggactttctaaggatattggatccatcaacatggatgagttcctgaagaacatatggacagctgaggagagccaactacagctacaagacatggcgccttctggtaatggaggggaaggaggtggtcaagtagggaatttgctgagacaggggtcattgactctgtcgcggactattagtcaaaaaacagttgatgaagtgtggagagaattattcaaagagacggaggatgtgaaagaagggagtagagaaggaggtgacataaatttgccacagaggcaacggactttgggagagatgacattggaggagttcct

SEQ ID NO: 1305 - DNA, 354 bp, Eucalyptus grandis
cgctgacgaggcggcgctctgcgggggctgcgaccaccgtgtccaccacgccaacaagctcgcctccaagcaccaacggttttcccttctctgtccttcccctaaggaattccctctctgtgacgtctgccaggagaggcgagcgttcttgttctgtcaacaggaccgagccattctctgcagggagtgcgatctcccgatacacacggccaacgagcatacccagaagcacagcaggttcttgctcacgggggtgaagctctccaccacgtcggaagtctacacgtctgccgccagcagtgcctctctgtccaacggatgcgatttcgtccccgacttcaaagtccgaagcat

SEQ ID NO: 1306 - DNA, 513 bp, Eucalyptus grandis
caaagacttgctttcctacatgcacattctgtatgagatctgcccctacttgaagtttgggtacatggcggcgaatggagccattgccgaagcatgcaaaaatgaggatcggatacacatcatagacttccaaattgctcagggcacccagtggaccactctccttcaagcgcttgctgcaagacctagcgggcccccttatgtgcggattacagggattgatgacccggtcaacaggtacgctcgtggggccggattggaagcagttgcaggaaggttggcggtgatctctgagaaatttaagatcccggtggagttcaacggtttgccggagtttgccccaaatgttactcgtgacatgcttgatgtcaggccgggggaagctctcgcagtgaacttcccactccagctacaccacacgccagacgagagtgttgacatcaccaatccaagggatgggctactaaggatggtgaaatcgctttctccgaaagtgatcacattgatcgagca

SEQ ID NO: 1307 - DNA, 348 bp, Eucalyptus grandis
agcagctccgcgtcgtgccggggcagcagcagagcccgcggagcgtcgagtcgctgtcctcgtccccgccggcgtcgccgatgtcgctttcgctgtcccggtcgccgttccgggcggacccgatgggcgagatggtcgcctccctcaggaacctgcagctcgacaaagtgaagtccatgccttgcggcgggtccacttccgggtcgccgagggcctccaggatccgaccggggttctacagcatgcccacgacgccgacacaatccaccccgacggcgcgcgggctggggtgcctggattcctgggagagcccttacgaggaagaaccggcgatggagaaggtggaat

SEQ ID NO: 1308 - DNA, 345 bp, Eucalyptus grandis
ggaaaagagaaggcagctttcccgtataaaacccaaacccctccaaattctccccccaattctccagccagggaagggcgagggcggcgacggcgacggcgacgatcatcccatctccgaccagctgatccttccgctccatcgtcgtcatgtacggacgggcggcggagtggagccgctacgaggacaaggtcttcgagcacgcgctggtggcggtggcggaggactcgcccgaccggtggcagctgatcgggaaccgcctgaaccggtccgcgtcgcaagtgttcgagcactaccaaaggctggtggaggacattgacgcgatcgagtcggggcgggtcgagc

SEQ ID NO: 1309 - DNA, 337 bp, Eucalyptus grandis
cattagagctgacccctgaaagtgttaagcatgggtcacaatctggtcaagaaggcagcactccctctatcagttatgaaaagagttcagaggatggatataattggcgaaaatatggccagaaaaatgttaaaggaaatgaatttgtgcgtagctattacagatgcacgcatccaaactgccctgtgaagaaacaagtggagcgctcgcgtagaggccggattaccgataacatctacttaggcgagcataatcatgctagcccacagaagcacctaccagtggctgtcagctttgctgtgtctatagttgaggagaaaccagagaagccttcccc

SEQ ID NO: 1310 - DNA, 383 bp, Eucalyptus grandis
gccccctttactttgttctctctctccccctctctctctcgccatcgaaatcgaagagccgcctctctctctctctctctctcttttccaagaagatcgagaatttggtcacccttcagcatctgacttaagtttagtctgaaggaggggttgcgtgattcccatgtgatgaagtgggaaacgggagttcccttaccaccatgtgcatcgagtgcgaattggtttttcaacgaggagggaaggaccgcgaaatggacccctgccgagaacaaaatgttcgaaaaagcgctggcggtgcacgatcaggacacgccggatcggtgggatagggtcgcctcgatgatccctgggaagacggtggaggatgtggttaagcactatca

SEQ ID NO: 1311 - DNA, 455 bp, Eucalyptus grandis
gttcatcggcggctacggtgcttccacatctaccccttctctttcctccccctcctcttcttcgtcttctctcttctctttcgagcccgtgtcgttctcggatggctgctcgacaagccccgaccctctgggcttcgagctacccggtccgatcgggctcaaccacctcaccccatctcagatcaaccagatccaagcccagatccagttccaaagcacgaacttgccctcctaccatggccacggctaccacccgagcatgcttctgggaccgaagcccgtgtccatgaagatttccgggtcggcgggcaaaccggcgacgaagctgtaccggggtgtgaggcagaggcattggggcaagtgggtcgcccgagatccggctgcccaagaacaggacccgcctctggctcggcaccttcgacacggctgaggaagccgccctcgcctacgaccgg

SEQ ID NO: 1312 - DNA, 472 bp, Eucalyptus grandis
tgcaaaccctagactccgcatcttcgggaggaacgtctcgctcctgcgaaacctcgtaccgcgcttcggcctcgcttgctcgataatggcagattctcctcgcaagaagtattcaagatccccctcaccttggagagagtaatcaaggtctaggtcgagatccaggtctaggtccccaacctggtacaagcaccggccaaggtcacggtccagaagccatggcagatcaagatccagaagtcatggcagatcagtggatgagaacaatcctggaaacgcactttacgtgaccggtttatccactagggtcactgaaagggacctagaagaccacttttcaaaagaggggaaggttgcttcgtgctttctcgtggtggagcctcgcacacgcatctcccgtggttttgcatttattaccatggagactgttgaggatgctaaccgctgtgtcaagtatctgaatcaagtctgt

SEQ ID NO: 1313 - DNA, 384 bp, Eucalyptus grandis
gcacagtctaacctgattacctacaaaggacctaccatgattgcttgtacactgcaagcaatcgccatattgttaaaggagagcttggagtgggattggtttatcaatctcagtgcttcagattatcctctggtaacgcaggatgatctgctttacgtgttctccaacgtatctagaagtcttaatttcattgaacatgatcagatttctggatggaaattgaaacacagatctaaatcaatcatcatcgatccaggattgtacctgtcaaagaagtatgaagtaacctggagcactcaacgtcgatcagttccaacatctttcaagttgtttactggatcagcatgggtaatggtaactcgctcttttctcgagtattgtata

SEQ ID NO: 1314 - DNA, 428 bp, Eucalyptus grandis
  misc_feature (1)...(428): n = A,T,C or G
ccgcggcgacgacctcctccggcgtctccgggaaggtccacgagtgctcgatctgccacaagagcttccccaccggccaggcgctcggcgggcacaagcggtgccactacgaggcccccgcccccatccccgcctccttctccgccccctccgccgccgccgccccggccgccagcggggtgagcgtgtcggagggcgtggggtccacgcacacgcagagccaggggcaccgcgagttcgatctgaacatcccggcgctcccggagttctcccccaggttcgtcgtctccggcggggtcgacgacnaggtggagagcccgcacccctccaagaagccccggttcctggcgccggcggtgaagacggaagcggcctgaactgggtcggatcgaaaacgcacagaagccaaaccaaaactctgcgagact

SEQ ID NO: 1315 - DNA, 140 bp, Eucalyptus grandis
ccaaggccgcggcggtgcacgagggcgagggagcgaggagcgagctgaagttcataggggtgcggaagaggaagtggggcaggtgggtctccgagatccgcctgcccaacagccgggagaggatctggctcggcttctac

SEQ ID NO: 1316 - DNA, 502 bp, Eucalyptus grandis
gtaaaaaaggggcagccctctgctctgtctgaattgccgtctctcgctacttctctgggcttctttttctttgcttcccttccttaaactctccctctccccgtttcttgtctggtttttctgggtgctctcgcttttcgctgctgaaggagtgagtttgaccgtcgggttcctttcttgatcctccaattcgatcgtcagctcctcgtgtcgacttttttcgggtttcctgtcggcactgttcgattcggattcctcgacggaatggggagtaacatcaacttcaagaacttcagcaccgatccgacgccgacgaataacaggcctcctggcaacacgctgttaacccggcaaccgtcggtgtacacgctgacctttgaggagttccagaactctataggcaaggactttgggtccatgaacatggatgagctcataaagaacatttggtctgcagaggagaaccaatctatggcatctgctagtggcgcttgtggtggcg

SEQ ID NO: 1317 - DNA, 365 bp, Eucalyptus grandis
cgctgacgaggcggcgctctgcgggggctgcgaccaccgtgtccaccacgccaacaagctcgcctccaagcaccaacggttttcccttctctgtccttcccctaaggaattccctctctgtgacgtctgccaggagaggcgagcgttcttgttctgtcaacaggaccgagccattctctgcagggagtgcgatctcccgatacacacggccaacgagcatacccagaagcacagcaggttcttgctcacgggggtgaagctctccaccacgtcggaagtctacacgtctgccgccagcagtgcctctctgtccaacggatgcgatttcgtccccgacttcaagtccgaggcatcgtcctcgttca

SEQ ID NO: 1318 - DNA, 372 bp, Eucalyptus grandis
gtacgataagtattccctctcagtcacccccgccgacgatcctcctgccgaccgcctcctcccccggccgttccgatcctcccggcgacgcgacgacaatggtgaagccgagcggcggcggcggcgatcggggccccccgctggcgccgttcctcagcaagtgctacgagatggtggaggacgaggcgaccgaccccatcatcgcgtgggggagcgccggcgacaccttcgtcatctgggacatcactcaattcaccctccagttgctcccccactacttcaagcactccaacttctccagcttcatgcgccagctcaacatctacggtttcagaaaagttgattcagatcgttgggaattcgcaaatgatg

SEQ ID NO: 1319 - DNA, 363 bp, Eucalyptus grandis
accctgtataatctcaatccttggatttagagaagatttgtccaggacaagaggagccacagatgaagcaatccatgcactgccgacctacaagtttaagttaaagaagaacagaaatagcagtgatacagaaaactcagcttctggggaaggagtaatagctgctggaacagaaagggagcgtgtgatttctggggatgatgctgtctgttgcatatgcttagcaaaatatgcaaacaatgacgagctgagggagcttccatgcaaccatttcttccacaaggagtgcgtggataagtggctgaaaatcaatgcattgtgtcctctatgcaagagtgaggtcgggataatcacgctggtatc

SEQ ID NO: 1320 - DNA, 401 bp, Eucalyptus grandis
atggaatgctatggttatgaggattaatgttgcacttttcgaagtctaggttaccccaattttgtcacttttgctgatttcccactattttcaggccttggttggcttaactggagattcatgggtgaatgtaagtcatgcgcatcacttgtattgtatgatatgtagcaactgcttgcttgagtcacatcacttgtcccataaaccttgtattgtagttctgtgttttcacggccagtaagattcaccttcttatgcatatctctattttcctgatgcatgagatctccctttctgttaagctctcttatttcgtcgatcagaatttgatcctttttcacacgaatacccttcaagctcatttccaattggttttccaaattctgtagttcttttacgct

SEQ ID NO: 1321 - DNA, 364 bp, Eucalyptus grandis
ctcgtgccgcggagtcttatatcagggagcttaacatgaacctacaagctgcagagtctgataaggaggatttgaagaagcagttggatgaactaaagaagcgatcatcggataaagaatgtatcccggtggatcaagatcgcaagatggcaaaacctacgggaagtaggtccactggggtggcaatcgatgtgaagataatgggttgggatgcagtggttcgagtagagagcggccggaaggatcatcctgcagcaaggttaatggtggctcttcaagaattgaacttggagttgcaacatgctagtgtttctgtggtgaacgagctcatgatccacaagccacagttaagatggggagtcag

SEQ ID NO: 1322 - DNA, 413 bp, Eucalyptus grandis
ttttttttttttttttcaaattcaagttgggaattttatgacagtgtagtggaagttctagacattgctcccttgatcctatggaagtagaattaaagctaatcatcaagctaaacatgaactacaactagtacaaaactttacagactcgtcaaaacccacaagtttcaccaccacgcagaagaagttgccatagctcgattcctccaccagagataaagagctccatccttctcttcgattctataattctcgttatattcccttaatagatttctgacagcatcagtaactgcagaactcaatgggaactgttgaaacccggccatcctaaaccttgacctccatttccccaaaagttcatgcctttcaaccctttccgtctcctcacaagctatcatggtggctatgtc

SEQ ID NO: 1323 - DNA, 382 bp, Eucalyptus grandis
caacaggatcctttgtgtactttctttgtatccacagaaagatggatgagagcaataacaaccctggggtggctgataatgccctgggcgacgacgggcagttcaaggagcaagaccggctgcttccgatagcgaatgttgggcggatcatgaagcagaacttgccgccgaatgccaagatctccaaggaggccaaggagacgatgcaggagtgcgtgtcggagttcatcagcttcgtcacaagcgaggcgtccgataagtgccggaaggagaggaggaagactgtgaatggagacgacatctgctgggcgatgcaagccctaggcttcgacgactatgcgagtgctttgaggaggtacctgcatagatatagggaaataga

SEQ ID NO: 1324 - DNA, 377 bp, Eucalyptus grandis
gcttacagggcctgcttggtgggttaattctttttcagctgatatcgttgtccttacggttatcctcttctctccaactcctctggttctctgttccgccaaagaaatggggagacattcttgctgtgtgaagcagaagctgagaaaagggctatggtcgcccgaggaagacgagaagctcttcaactacatcacccgattcggcgtcggctgctggagctctgtaccgaagctcgccggtaagacatgatgacagacgggaaaggagaagctcattcacagttgttttctggggaataagtttctgttcttggagagaatttgattcgaaaaccatgtgaatgatcgaattctctcgtcgaatgcacgactccaga

SEQ ID NO: 1325 - DNA, 305 bp, Eucalyptus grandis
tgattccgagccgagccgccgcggcgtccgacgacgttccggaagtcgccggatcggcaccgaaggggcacgtacaacagcagcagcagccgcaacaggtcggcgccggcgagcccaagtacaggggcgtgcggaggcggcggtggggcaagtacaccgccgagatcagcgaccccgtcaagaaggcccgcgtctggctcggcaccttcgcctccgccgaggaggccgcccgcgcctacgacctcgccgccgtccggttccgcggctccaaggccaagaccaacttccccgcctccctctacgac

SEQ ID NO: 1326 - DNA, 288 bp, Eucalyptus grandis
gtgctttggagtcagcttcctcctctgcttccgaatattgacttctcgagaatacagctgacttctcatattcagagtccgatcgtcggagctcggcgcgttcgatagggaattggctggcttcaggttcctggggtctgtgctttggatgttaagctcgtagagactgaatcgacgatggatggttcgcaaggaaaatcgaatgctccggctccgttcctggtcaagacctatgagatggtcgatgatcctcagacggacttcctggtgtcctggagcgagagcgga

SEQ ID NO: 1327 - DNA, 190 bp, Eucalyptus grandis
gagagagatggggctccggaggatgacgggtcagtcgtcgtcccggtcgggcgacccgggcgcctccaccagcggcggcggcggggcggagtcgccgcggcggttcgcgccggcggctcagccggagataatgagggccgccgagaaggacgaccagtacgcctccttcctctacgacgcctgccgcgac

SEQ ID NO: 1328 - DNA, 259 bp, Eucalyptus grandis
gtggtttcggctcgccgggcccgttcgaggaggagcttccgcggcggggtggtggccatggccgcgcccgggtcggtccggaagtcggaggaggagtggcaggcggtcctgtcgccggagcagttccgtatcctgaggcagaaggggaccgaatatccaggcacgggtgaatacacaagttttctgaagagggggtgtacaattgtgcaggatgtgggactcctctttaccggtctacaactaaatttaactccgctgc

SEQ ID NO: 1329 - DNA, 381 bp, Eucalyptus grandis
gacaggggtttctgtgttggattgtgtgtggagatttggagggacgagtcatggcggatcaggccttggagggaagccaaccggttgatctgtccaagcatccttcaggaatcgttcccactcttcagaacatagtctcaacagtgaatttggactgcaaattggatcttaaggccattgctttgcaagctagaaatgctgagtataatcccaagcgttttgctgctgtaattatgagaataagggagccaaagacaacggcattgatatttgcttcagggaaaatggtttgtactggagccaagagtgaacaacaatcaaagttagcagcgcggaagtatgctcgaatcattcagaaacttggattcccggctaaattta

SEQ ID NO: 1330 - DNA, 347 bp, Eucalyptus grandis
ccgctctcctccgccttccgccaccgcaaatccctccgatcgatcggcacgacacgacccgaaaacgaccccggaaagcctccgctccccgcggcggaagatggcggcgagcgacgcgaagatcgggaggaggttagagggcaaggtcgccatcgtcaccgcctccacgcagggcatcggcctcgccatcgccgagcgcctcggcctcgaaggcgccgccgtcgtcatctcctctcgcaagcagaaaaatgtggatgaggctgctgaaaagctcagggcaaagggtatagaggttttgggcttggtttgccatgtttccaatgcacagcagaaggaaatcccttgtt

SEQ ID NO: 1331 - DNA, 337 bp, Eucalyptus grandis
gataagtccaaggggaaggccaagatcagcgcctcctccgcggccgagcaggagcaccggaagcgcgtgctccgcgagctcaactccctcatcgccgggccctcctccgccgccgccgccgcccccgacgacgccgtcgacgaggaggtcaccgacaccgagtggttcttcctcgtctccatgacgcagtccttcggcaacgacggcagcttgcccggccaggccctgtacgggtcgaccccgctttgggtgtcgggcggggaccgcctcgccgactgcggctgcgagagggcgaagcaggcgcggattttcgggctcaacaccatggtctgcgtcc

SEQ ID NO: 1332 - DNA, 325 bp, Eucalyptus grandis
  misc_feature (1)...(325): n = A,T,C or G
gccaatgggagggaggagcctctgaaccacgtcgaggcggagaggcagaggagggagaagcttaatcagaggttttacgccctcagggccgtggttccaaatgtatcaaagatggataaggcttcactgctccaagatgcggagtcttatatcagggagcttaacatgaacctacaagctgcagagtctgataaggaggatttgaagaancagttggatgaactaaagaagcgatcatcggataaagaatgtatcccggtggatcaagatcgcaagatggcaaaacctacgggaagtaggtccactggggtggcaatcgatgtga

SEQ ID NO: 1333 - DNA, 362 bp, Eucalyptus grandis
cagcatcattataatgtccatgaagagaatcgactgcggcatcacgatttacattagtttcgcctcccttttcgcttgctgcacctgtgcaagcctttgacttcgtagagtcatgtgcgttccttgggcacccttctttgtagctggtggagcagggggggctacaacggatgcttgggagagtgatatgcgcgtctcatcagatgagaaaccgggaatacgaatgttgtggttgcgttcaaggtgtagttgcaggtcgcgcacttccaaagtgtccccaccgcgatgcttagccaagcgacacgcaaagttggtgacggaatcgatgaattcatcagcaatagaaagcaggagatcttcca

SEQ ID NO: 1334 - DNA, 216 bp, Eucalyptus grandis
gtttacgcggttgttgatggattacttaaatgaatttgcttatgatgcacgggttgctggcctttattacagtgtgcatgacaccaacacaggttttcaggtcactgtggttggttatagtcacaagctaaggatattgctggaaaaagtcatcgagaaaattgcaacctttgaagtgagacctgagagatttgttgtgatcaaggaagtggtgac

SEQ ID NO: 1335 - DNA, 326 bp, Eucalyptus grandis
  misc_feature (1)...(326): n = A,T,C or G
gcngaatcagagcaactgggaggcggataagatgctcgacgtttacatgtatgactacttgatgaagaagaagctgcacaacacggcgaagtcattcatgactgaagggaaggtgtcgccggatcccgttgcaattgatgctcctgggggatttctttttgagtggtggtcagtcttttgggatatatttattgcaaggactaacgagaaacattctgaagctgctgcagcatatattgaggcacaacaaggtaaagcaagagagcagcagcagcagcagcagcagcagcagcagcaacagcaactgcagatgcaacaattgcatc

SEQ ID NO: 1336 - DNA, 382 bp, Eucalyptus grandis
aaacaatcgataatccttccttccatctttcctcctcctcccccccttgaaatcccgaatccaccaccacaaccccccaccgccacctgctcgttggtaatctctcttttgcttctggagagggaagtgaagtgatctcggatcagctgactttggagaatgatcctaaagctggtatttctacattgagatcatctttaagagcgctgtggttctctgatggcatctcatccatcaaatcattcgtgtgggcgccctcatcaaggtgcgtttgctgatgctttatacaaagagctgtggcatgcctgtgctgggcctcttgtcacccttcctcgagagggagagcgtgtctattattttccacaaggtcacatggagcagc

SEQ ID NO: 1337 - DNA, 322 bp, Eucalyptus grandis
ctctctctctctaggtcgctctcgattctcgctggtctcgccttcctcggactatcttcgcgatcgcttttggaggatcgttcggggaaattggaccgaagtttcgatttttagcaggcgagatcagctgaatcgggagatcagaataatggagtctcacgatgagacaggatgccaggccccaaaaggcccaatcctctgcattaacaactgtggcttcttcggaagtgctgccaccgccaatatgtgctcaaagtgccacaaggacgtgatattgaaacaagaacaggcacaagcagctgcctcctcgattgagagcatt

SEQ ID NO: 1338 - DNA, 536 bp, Eucalyptus grandis
gttcgacgagttcacagcgagctgacaaatcattgatcatggagcatgagtttagttcggctaaaatcaaagctcttcttgagattctacagtcgcaatgcagaggagaaagtgcaaatgcagagcttcatggtcccatgggctgtgacgatgagtctctttttgaaaatacaggcaccggggattctacatacagagttaaagctgttaagcacacaactgtttattcaagttctcctcctgaaggaccaattaaagcaattgtcttttctcagtggacgagtatgttaaacttggttgaacaaaatctgatccattttggcataaattatagacggcttgatggaacaatgaccctttctgcaagagacaaagctgtgaaagattttaacaccgatcctgagatagtcgttatgctaatgtcattaaaagcaggaaaccttggtctaaacatggttgctgcttgtcatgttattcttttggatctttggtggaatccaaccactgaagatcaagctatcgatcgagctcataga

SEQ ID NO: 1339 - DNA, 438 bp, Eucalyptus grandis
cgacttcaaggagtaccgacttcgctgcgagctgcgcggccacgaggacgatgtccggggcgtatgcgtgtgcggggacggcagcatcgggacctcgtcgcgggatcggacggtgaggctgtgggctccgagcgccggcgagaggcgcaagtacgaggtggcgagggtgctgttagggcacaagagcttcgtgggtcccctggcgtgggttccgcccagcgaggagcttccggagggcgggatcgtgtccggcgggatggacactctcgtgatggcttgggatttgaggaatggagaggcgcagacgttgaagggccatcagttgcaggtcaccggcatcgtgttggacggcggcgacatttgtttctgcctcttgttgattgtaccttaataagatggaagaatggccagcttacggagcactgggaggctcattaa

SEQ ID NO: 1340 - DNA, 533 bp, Eucalyptus grandis
ctttggaggccctcagctcccccaccgctccctccgccccgttccaattcatgaaggactcctcccccgccgccgccgccgccgcctcctcctcctcctccgcctacgacctccccctcgccgagccctgggccaagcgcaagcgctccaagcgcccccacaacccgccctccgaggacgagtacctcgccctctgcctcatcatgctcgcccgcggcggcgccggccggaccctccccccgccgcctccccccgcggtctcttccgaggcggccaaggtggcctacaggtgccccgtctgcgacaagggcttcccctcctaccaggccctgggcggccacaaggccagccaccgcaagcacgcctcctccgcctcggccgccgccgggggtgacgaccagccgaccacctcgagcacctccgcggcgacgacctcctccggcgtctccgggaaggtccacgagtgctcgatctgccacaagagcttcccaccggccaggcgctcggcgggcacaagcggtgccactacgagg

SEQ ID NO: 1341 - DNA, 363 bp, Eucalyptus grandis
gaagcatttgggaagtggacatggaaggaaagatcccgactttggtactgtttctctgcatcttctcggctgccgtcgcggccgagtacgtgcggccccagcctcgcgagaccctcgatttcccgtgggaccgcaagccctcctcttatccccagcaggttcacatttctttagctggagatggacatatgcgcatttcatgggtcactgatggtaaatcttccccttcatacgtggaatacggaacatcgcccggtcgatatgactctacagctcaaggagagagcacttcttatagttatctattttatagctctggaaagatacaccacacggtgatcgggccattggagagcaacactg

SEQ ID NO: 1342 - DNA, 316 bp, Eucalyptus grandis
cctggcctctgccttagctctcctcctcgtcctcgcccttatcaagctattcagacccaaaaccaaccacctgaacctcccgccggggagatttggatggccaatcattggcgagagcctggagttcctccgttcccagcttgaagggagcccggagaagttcatcaaggaccggatgaccaagtacaactcccctgtgttcaagacctcggtgctcggggagccgatggtcatcctgtgtgggccggcggggaacaagttcctgttctcaaacgagggcaagaaggtggtgctgtggtggccgagctcggtccat

SEQ ID NO: 1343 - DNA, 322 bp, Eucalyptus grandis
aggtgttccgatcttcatagaagatgatgatgttgagctgttgtggcctggcagcttccgtcaggcggcacaagcacacgctcctcaaccgagttttgttctaactggaggttctaacataagcttcgtcggggtgaatccaccatctgatgcaggcaattcagctcctgacttgacactgaaactttaaaagaggttaatcttcagttaagtctcatgtttgcttaacccaacattgcacttctgctttcttttggtatattcccaaatgttctttccagttcctttcctgtaagtgctcactccagtatgaagtctataa

SEQ ID NO: 1344 - DNA, 323 bp, Eucalyptus grandis
ctggaccgccacctgaagaccctgaccggccacgtcgccgccgtctcctgcgtcaagttctccaacgacggcaccctcctggcctccgcctccctcgacaaaaccctaatcatctggtcctccaccgccctctccctcctccaccgcctcgtcggccactccgagggcgtctccgacctcgcctggtcctccgactcccactacatctgctccgcctccgacgaccggaccctccgcatctggtcctcccgctcccccttcgactgcctcaagaccctgcgcggccacaccgacttcgtcttctgcgtcaacttcaacccgca

SEQ ID NO: 1345 - DNA, 235 bp, Eucalyptus grandis
cctccgccccgttccaattcatgaaggactgggtaccccgccgccgacgccgccgcctcctcctcctactacgaatacaacctccccctcgccgagccctgggccaagcgcaagcgctccaagcgcccccacaacccgccctccgaggacgagtacctcgccctctgcctcatcatgctcgcccgcggcggcgccggccggaccctccccccgccgcctccccccgcggtctctt

SEQ ID NO: 1346 - DNA, 350 bp, Eucalyptus grandis
gtttggaggaagttcaagctatgggaaggatgctcaaagcccgcaggacatgcatgattcacggccgacaaaacgaccacgtaatgttggggagccttatcgtgacccaggacaggctgagccgatggaggaacatggaatgggatcagcaagtgatcctatggtgcgggcaggcagatcggacggaggtcataatccaattatgtcggccaccgctcccgcaaatgtgtctacggctgggagaggtcgggtagatgataaaaacaatcgcaaattgtcgtgtaaagagtgtcgtaggctaaaactcaagtgcgaccgcgttttcccttgccagtcatgcgtcaagagag

SEQ ID NO: 1347 - DNA, 197 bp, Eucalyptus grandis
cggactcggactggccgagtcaacccacgccccccgcgagtcccgaccccccggcgccatgacgcggcgatgctcccactgctgcaacaagggccacaactccaggacctgccccgtccgcggcggcggcggggacggcgggggcgcggcggccgccccctcctcctcctccccctccacctcctcctctggcgccg

SEQ ID NO: 1348 - DNA, 315 bp, Eucalyptus grandis
cgctggtctcgcttcctcggactatcttcgcgatcgcttttggaggatcgttcggggaaattggaccgaagtttcgatttttagcaggcgagatcagctgaatcgggtgtccttttgcaggtgatcagaataatggagtctcacgatgagacaggatgccaggccccaaaaggcccaatcctctgcattaacaactgtggcttcttcggaagtgctgccaccgccaatatgtgctcaaagtgccacaaggacgtgatattgaaacaagaacaggcacaagcagctgcctcctcgattgagagcattgtcaacaga

SEQ ID NO: 1349 - DNA, 329 bp, Eucalyptus grandis
gagagagatggggctccggaggatgagggtcagtcgtcgtcccggtcgggcgacccgggcgcctccaccagcggcggcggcggggcggagtcgccgcggcggttcgcgccggcggctcagccggagataatgagggccgccgagaaggacgaccagtacgcctccttcctctacgacgcctgccgcgacgccatccgccacctcttcggcaccagagtcgccgtggcgtatcaaagcgagacgcagcttctcgggcaaatgctgtactatgtgctgacgactggttcggggcagcagacgttgggggaagagtactgcgacatcactca

SEQ ID NO: 1350 - DNA, 313 bp, Eucalyptus grandis
tctaggtcgctctcgattctcgtggtctcgccttcctcggactatcttcgcgatcgcttttggaggatcgttcggggaaattggaccgaagtttcgatttttagcaggcgagatcagctgaatcggaataatggagtctcacgatgagacaggatgccaggccccaaaaggcccaatcctctgcattaacaactgtggcttcttcggaagtgctgccactgccaatatgtgctcaaagtgccacaaggacatgatattgaaacaagaacaggcacaagcagctgcctcctcgattgagagcattgtcaacaga

SEQ ID NO: 1351 - DNA, 305 bp, Eucalyptus grandis
  misc_feature (1)...(305): n = A,T,C or G
ccccgcccacttatctgctatcctcgctacttcgctctattagtacctccacaatcccatgcgcaaacgccaacgcaccctcgacatgcacgccggcgcaccaggtcccaacgatgccattgacgcgaacagcgtcggcgacaacgcgttcatcgcggatcacgacgcaattgactcggccggcgacgacgacnacnacnaagacaagcccaagaccggccagaagcaaggccgccgcaaaataaagatcgagtttatacaggacaaatcgagacgccatatcaccttctccaaaaggaaagctg

SEQ ID NO: 1352 - DNA, 517 bp, Eucalyptus grandis
  misc_feature (1)...(517): n = A,T,C or G
gtccctccctagggtttcctcctcgtcgaccgccccttctccgagccctagcctcgcgcggcaaaggcccctccctccgtccctccctccgccgccatgatgcagcagccggtccccggagccgtccccgaccagcagcagcagtaccagcagcagcagcagcagcagtggatgatgatgcagcaggccgcccagcccgtgcccccgccggtgggctggaccccgcagccggtcccgccgcccatggcggcccagtcgatggccggcggcgcggcggccgagatcaagtcgctctggatcggcgacctgcagcctcacatggacgagacctatctcctcaactgcttngcccactccggggaggttctctcagctaaggtgattagaaataagcagactgctctgcccgagggttacggtttcattgaatttatgacccgtgcagcagcagagaggattttgcagacgtacaatggcacattgatgccaaattctgaccagaatttccgactgaact

SEQ ID NO: 1353 - DNA, 472 bp, Eucalyptus grandis
tttttttttttttcagctaaattggagcagctctctttaatacttactgaactagtaatcatggtgaaagaaacttagacagaaagtgaggacattacatcatactcctgaagagcatcaaaggcccagctaacagaaaaaggccgatacggcaacatccaaacaaattaaaagccaaattgtgaccccaacgctaccatccatatacaatgccataactaaatcattcaccttccgacatctactctctttctacttgaatggtgacgtgacttatcttgtactctcttctaatgtagtccacaaccttgtccaggaccatatcggcattggcgtcacgctttattttgacatggcaggctaatagtacctttccaaccgttatagcccagatgtgcaattcatggactgcaatcacttcatcgatcttgcaaagtccactctcgagcctagtggcatcaatctctctagg

SEQ ID NO: 1354 - DNA, 472 bp, Eucalyptus grandis; identical to SEQ ID NO: 249

SEQ ID NO: 1355 - DNA, 503 bp, Eucalyptus grandis
cacgcatccaacttcatcaggaaggagctgagggccatcatcaagcagaggaagctggacttggcagaaggcagggcgtcggcgactcaggacatattgtcgcacatgctgttggccacggacgaagatgggaagcacatgaacgagatggacattgctgacaagatcttgggcttgttgatcgggggccacgacactgccagtgccgcctgtaccttcatcgtcaagtaccttgccgatcttccccaagtctacgagggagtctacaaggagcaaatggagatcgccaagtcaaaagccccaggagagttgttgaactgggatgacatccagaagatgagatactcatggaatgtggcgtgtgaggtgctgcgattggcgcctccgctccagggagcattcagagaagccctcaatgacttcatcttcaatggtttctccattcctaaaggctggaagatctattggagtacccactcgactcacaggagcccagagtactt

SEQ ID NO: 1356 - DNA, 360 bp, Eucalyptus grandis
atcttcttctcccccaaaaccccatcggacccaaaaaccctaacgaagatgaatagggagaggcttatgaagatggcgggttctgtccgcactggtggaaagggtaccatgagaagaaagaagaaggctgttcataagaccaccacgacagatgataaaaggcttcaaagcaccctgaagaggattggggtgaatgccatccccgcaattgaagaagtcaacatttttaaggatgatgtagttatccagtttttgaatcccaaagttcaagcgtctattgctgcaaatacctgggtagttagtggttctcctcagaccaagaagctacaggatatcctccctggcatcatcaaccaatta

SEQ ID NO: 1357 - DNA, 377 bp, Eucalyptus grandis
aaaacaacctccctcagctcctcttcaccactggtttttgagatgatctgtgtgctcggcgccgttgattattatgtcttattctgacttgctgaacctgctgtttgccgtgggcgtttggtgcaccgcgtatattgcggctgccgttctcgagtcgctccgggtcttccatactctctgttcgttttgatttcgatagctgttttcgaaggctaagatgggctacgcacagctggtcatcggccctgccggcagtggcaagtcgacttattgctcgagtttgtatcaacattgtgaagctattgggcggacaatacacattgttaacctagatcctgcagcaaagaactttgactatcctgtggccatggatatca

SEQ ID NO: 1358 - DNA, 360 bp, Eucalyptus grandis
ctctgacgatggatataactggagaaaatatggacagaagcatgttaagggctgtgaatttccacgcagctattacaaatgtacctatcctaattgtgaggtgaaaaagcttttcgaacgtgctcctgatggacatattacagagattatctacaaaggaactcatgatcaccctaaaccacaaccaagccgccgctttactggaggagcgaccatgccaatccaagaagaaagatctgataggttttcatttatacctgcagtggagagcacatcgaccgtatatggcgagacatcttataatgttgagactgatggtactcctgaactatctcctgttgctgagaatgacgaaactat

SEQ ID NO: 1359 - DNA, 347 bp, Eucalyptus grandis
gttccaccacgctcgtcccgctcccgcatttctgaaatcgcgatcgccgtcttcaacctcgggaaaaaccctagcggatcccctccggtcgccaattcatctcctgatccccgccgtcgcccatgccgccgtcgatcccgccgcgccccctctcgccgtcgatctccagctgatcgcgcctccgattttgctccccgccccggcgcgatggtggtctgcaaatgccgcaaggctacgaagttatactgcttcgtgcacaaggtccctgtgtgtggagaatgcatatgctttacggagcaccaaatatgcgtggttcgtacttactcagaatgggttatagatggcga

SEQ ID NO: 1360 - DNA, 326 bp, Eucalyptus grandis
  misc_feature (1)...(326): n = A,T,C or G
ctcctcctccccctccacctcctcctctggcgccgcggcngcggcggcggcctcngcctccggcggcggggtgaagctgttcggggttaggttaacggacgggtcgatcatgaagaanagcgccagcgtggggtgcctgtccgccgcccactaccactcctcgtcctccgccgcggcatccccgaaccccggctcgtccccgatcgacgggagcgacggctacctgtccgacgatcccgcgcccggctcccgctcgtccaatcggcgcgtcgagaggaagaaaggtatcgaggattttgattgacgcgcggctccctgattccctg

SEQ ID NO: 1361 - DNA, 526 bp, Eucalyptus grandis
atcccactccccatccgctccgcctgaatcctctcctgggaaaattagggtttctgcaagctccggattttcgctcccttttgggggtcctcgatttgatgataagccatggatgcctggggtcgtgctagtgtgctgcgcgcgctcctgtggctcgccttgcttggggttggccgcacggcgtcggcgagcgtcgtcctgatcggcagcaacgtcaccctctccttcgccgccgtcgaggctgaattcgctccgccgattaagggttctggggtttgcggcgtgctgtatcttgcggacccgatcgatgcgtgctctcaattggtgaatgaggccaaccggttgccgaatgctagctcccctttcgccctaattgttaggggaggaggatgtagtttcgaagagaaagttaggagagctcaaaaggctggattcaaagcggctattgtctatgacaacgaagctgatggcaacttggtgccaatggctggacattcagctgggataaagatccatgctgtgttcg

SEQ ID NO: 1362 - DNA, 307 bp, Eucalyptus grandis
gacccgcatacccgctgccaatctggaggacctatttgacaaccataacatggctcgaatacgggacgtatgggccccgaatcttgagatagagatgcagaacatccgcgaggccatcgagaaatactcgtatgtttcaatggacaccgagttcctggagtggtggcgcggcccataggtaacttcaaaacgtcctcggactaccactaccagacgatgcgctgtaacgtcgaccttctcaagatcatccaagtcgggatcacgctggcagacgaggaggggttgttcccgcaggactgctctacgt

SEQ ID NO: 1363 - DNA, 353 bp, Eucalyptus grandis
  misc_feature (1)...(353): n = A,T,C or G
cttgaaggtgacttcaacaaacacgatgaggataactggatccaagaagagtttgagaaccatgtggntaaacaacgtgaaggaaagaggccgcttttgactggagatctcctagtgaagctcgaaagaggtgttgggaagctgggaagtttcatgtttactgacaattccagctggaataggagtaaaagtttcaggatagggcttaaggtggcctcaggttattgtgggaacacacgaatccgagaagcaaaaacataagccttcactgtgagggagcatagaggagaatcatataagaaacattatccacctgcacctgacgattaaatctggaggttggagaagatcgc

SEQ ID NO: 1364 - DNA, 324 bp, Eucalyptus grandis
cctcgcccggcaaaaccgattcgaggtcgagagtcgagtaaagatgaatgtggagaagcttatgaagatggcgggttcagtccgcactggtggaaagggtaccatgagaagaaagaagaaggctgtgcacaagacaactaccacggatgacaaaaggctccaaagcactctcaaaagaattggggttaatgctattcctgcaattgaggaagtcaacattttcaaggatgatgttgtcatccaatttgtaaatcccaaagttcaagcctctattgcagccaatacatgggttgtcagtggtgctcctcagaccaagaaattgca

SEQ ID NO: 1365 - DNA, 306 bp, Eucalyptus grandis
gacaaattgatgaaacatgaatatggatgggtgtttaacactccggttgatgtaaagggcctcggtttgcatgattactatagcatcataaagcatccaatggacttgggcagtgtgaagacaaggctgaaccggaactggtataagtcaccgaaagaatttgcagaggatgtcagacttacgttccgtaatgccatgacatataaccctgaagggcaagatgttcatgtcatggctgagattctgtacaagatatttgaggatagatgggccattatagagtcagattataatcgtgaaatgcgg

SEQ ID NO: 1366 - DNA, 345 bp, Eucalyptus grandis; identical to SEQ ID NO: 194

SEQ ID NO: 1367 - DNA, 292 bp, Eucalyptus grandis
cgaaggtctcacatttatgaaactcaaggtctgaaggatgcatttattatatgtctcaatgccgtagagtccattgatgcaactaaaaaggggagccttgctaggttcataaatcattcatgccagccaaattgtgagacaaggaaatggaatgtattgggggagataagagttggcatatttgccaagcatgacattcctgctggatctgaattgtcatatgattataacttcgagtggtatggtggagccaaggtccgttgtctctgtggtgcacctagctgtctggttt

SEQ ID NO: 1368 - DNA, 278 bp, Eucalyptus grandis
ctgcaacgacctgacggcgttgcggcggttcctgccgtcgaaccaccaccaggacgaggaggacgaggaggacgggcgggcgcccggggaggacggcgtgctgggctgcgacgagttccggatgtacgagttcaaggtgaggaagtgcgcgcgcgggaggtcgcacgactggacagagtgcccgtacgcgcaccccggcgagaaggcgcgacgcagggacccgcgccggttcttctactccggcactgcatgtcctgatttccgcaaaggcgcgtgca

SEQ ID NO: 1369 - DNA, 328 bp, Eucalyptus grandis
ttcacttcgtcgcctgcctcgtcgtcctccctgtcctcctcgcgaatctccatcggcgagaactctgataaagcatccctcggctatctgtcggatggcctgctgggtagatcccaagagaagaagaaaggagttccatggacagaggaggaacacagaaccttcttggtggggcttgagaagcttgggaagggtgattggagaggcatctctaggagctatgtgaccacaagaacaccggcccaggttgcaagtcatgctcagaaatatttcctccggcaagtgagcttcaacaagaaaaagcggcgctcgagcctctttgacatgg

SEQ ID NO: 1370 - DNA, 96 bp, Eucalyptus grandis
  misc_feature (1)...(96): n = A,T,C or G
tgaattcggcggggagttaatgaatccaagaagcaactggctaattgtatataatgatgatgagggngacatgatgcttgttggggatgacccgtg

SEQ ID NO: 1371 - DNA, 320 bp, Eucalyptus grandis
agagagagaagaacccttcttcacaaacctctctctctctctctctctctcttcccctgtgtctgtcgattctcgctggtctcgcgttcctcggattgtttcgatcgcgtacgctgaatcgcgccgggaattcggccgtggtttcgattttgtcgagcgagatcagcagaatcaggagatcaggacaatggagtctcacaatgagacaggatgccagcctccaaaaggcccaatcctctgcatcaacaactgtggcttctttggaagtgctgccactgccaatatgtgctcgaagtgccacaaggatgtgatgctgaagc

SEQ ID NO: 1372 - DNA, 343 bp, Eucalyptus grandis
cggccgcctgcagctttcccctccgtgtcgacacgacgacgactccgccgccgctcccccctcgcgtcgtctctccttctctcgccctgtatatatctctcgtcccccgacaaaaaaaggagaaatctgaagagaggggactgaaattaggttattgagaaggattcttcccgtgaccaatcttttggagaaagatggcttctcaatttaatttcaaaggcataaccgatgcatcgcaagctgaaggagtagctgggaaatcacacggaaatcactctttaactcggcagccatcaatatatgctttgacttttgatgagtttcaaaacacatggggtgggct

SEQ ID NO: 1373 - DNA, 310 bp, Eucalyptus grandis
ctccccctcgccgagccctgggccaagcgcaagcgctccaagcgcccccacaacccgccctccgaggacgagtacctcgccctctgcctcatcatgctcgcccgcggcggcgccggccggaccctccccccgccgcctccccccgcggtctcttccgaggcggccaaggtggcctacaggtgccccgtctgcgacaagggcttcccctcctaccaggccctgggcggccacaaggccagccaccgcaagcacgcctcctccgccgcggccgccgccgggggtgacgaccagccgaccacctcgagcacct

SEQ ID NO: 1374 - DNA, 306 bp, Eucalyptus grandis
  misc_feature (1)...(306): n = A,T,C or G
agcaagcaaaagaagaaaccagaaaaatcagacaccccgatttcacattctctactacagaattccggagatggtgaagagagacagagaggacacggaggtcgaagccctggccagggccaattgcttgatgctcctctcccgtgttggcgagagcaccgactcggcgtcgccggaccgcaaatcgcggcctacagagcgaatgttcgcctgcaacacttgcaaccgcgagttctnctcgttccaggcgctcggagggcacaaagccagccacaagaagcagaagctgatctccggtgacctctt

SEQ ID NO: 1375 - DNA, 273 bp, Eucalyptus grandis
cctcctcctcctgctgcggctacgacctgcccctcgccgagccctgggccaagcgcaagcgcttcaagcgcccccacaacccgccctccgaggacgagtacctcgccctctggctgatcatgctcgcccgcggcggcgccggccggaccctacccccgccgcctccccccgtggtctcttccgaggcggtcaatgtggcctacaggtgccccgactgcgacaagggcttcccctcctaccaggccctgggcggccacaaggccagccaccgta

SEQ ID NO: 1376 - DNA, 319 bp, Eucalyptus grandis
gacaaatgagaaccctaggacgccttcagtcgacaaggagagcactactccaaggacgtcgaaatcagaagaggagcagagcgacacgagcaactcgcaagagaaggtgctcaagaaacctgacaagatacttccttgccctcgatgtaatagcatggacaccaaattctgttactacaacaactataatgtgaaccagccccgacacttctgcaagaactgccagagatactggacagctggtggaaccatgaggaatgttcctgtgggtgctggccgccgcaagaacaagaactcggcatctcattaccgtcatcta

SEQ ID NO: 1377 - DNA, 339 bp, Eucalyptus grandis
tctctctcttcgtttctcccgtttctctctctctacctctcgccaagaaaccgccaggaaaggaaggaaggtaaaaagaaaagaaaaggaagccatggctccgagagaaaagcccagcgtcgccgccatcccaaaccctaacggcgctaaggaaatccgtttccggggcgtccggaagaggccctggggccgctacgccgccgagatccgggaccccggcaagaagacccgggtgtggctcggcaccttcgacacagccgaggaggccgcccgcgcctacgacaccgccgcccgcgagttccgcggcgccaaggccaagaccaacttccccacctccgc

SEQ ID NO: 1378 - DNA, 343 bp, Eucalyptus grandis
ctttgacgcgcattaaattcccgcgactccgaaatatctcacctccctctcccgcagaatccctagattccttccttagctcctcctctctccctctctctctctctctctctatagaaaattcctcatctttggtggcggcgagaggcggttgcgagggatttccggtcgcgggtgtatgtgcgtggggttggggttggggtgggggagatgaagattcagtgcaacgtgtgcgaggcggcggaggcgagcgtcctctgctgcgccgacgaggcggcgctctgctgggcctgcgacgagaaggtgcacgccgccaacaagctcgccagcaagcaccagcgcg

SEQ ID NO: 1379 - DNA, 368 bp, Eucalyptus grandis
ctcgattctcgctggtctcgccttcctcggactatcttcgcgatcgcttttggaggatcgttcggggaaattggaccgaagtttcgatttttagcaggcgagatcagctgaatcgggagatcagaataatggagtctcacgatgagacaggatgccaggccccaaaaggcccaatcctctgcattaacaactgtggcttcttcggaagtgctgccaccgccaatatgtgctcaaagtgccacaaggacgtgatattgaaacaagaacaggcacaagcagctgcctcctcgattgagagcattgtcaacagaagttccaacgaaaatggtaaaggacctgtggcaactgaaaattggatttgcaagctg

SEQ ID NO: 1380 - DNA, 362 bp, Eucalyptus grandis
gaggctcagtacttcgtgtagccatggggcatgaaagtgaagcatttgaagagtttgttgatgcgcacaaaacttgcttgaatgatctcatgttcttccctactcgtaatgccttggactctcaagtgttgctgcaaatgcagaaaagcttgctgccttgcagaacgaatatcattttgctaaagcaaggattgatgaagatcatgagaaggcgcagcgactggagaagaaggtcaaaactctcacattcggctatcagatgcgggagaagactcttcgagaccaaattgagtcaaccttcaagcagctggacactgcagggacagaactcgagtgtttcccagctctgcagaagcaagagc

SEQ ID NO: 1381 - DNA, 459 bp, Eucalyptus grandis
tgctcgcaaagtttgtttctttgctcacaagcccgaagaattaaggcctgtctatgcttcgacgggatcagctatgccttccccaaaatcctactcatcaagtgggctggacatgtccacattgagtcctctctcaatcagttctccgtcagcatcgttgcctgttacttcaacagcacccatgtctcctcttgcagcctcgtcatctccgatgtctgtgaacatgtggcagagcaaggctaacaagctctccccgccaatgctgcagctctcaggtagtaggctgaagactgctttgagtgctagggacttggacctggagatggaattgcgtggtctagagagtcagatggccactcaacagcatcagttgatggaagagatatctcgtctctcctcaccatcatcctgctttagtagtaggattggggaagtgaaacccactaacctcgatgacgt

SEQ ID NO: 1382 - DNA, 319 bp, Eucalyptus grandis
aaaaaaagaagcataacttcaacgagcgaatctccctctgtctctggttcatctttggttcttcaggctcagaaccatggctcagactgttgttctcaaggttaaaatgtcatgtcaaggctgcgctggagctgtcagaagggtcctggaaaaaacggaaggtgtggaaacatttgacatcgatctgaaggaacagaaggtgacagtcaagggcaatctgcagcccgatgctgtcctgcaaaccgtctcaaagtccggaaaacaaactgctttctgggaagcggaagccccagcccaacccgaagtgaagcccaccgaa

SEQ ID NO: 1383 - DNA, 408 bp, Eucalyptus grandis
cttgctttcctcttgttggtccaacgcagagagaagagagagagagagaggtggaagaagatcaatctcgtatctgaccggcgaccggtggtgctcttcatcttctccacctcatcctctctctctagagaaccgaaagccggcgtctttcgtcgtctccggttcggcatgaacgggaaggccaacgtctccaaggagctcaatgcgcaccacagaaagattctcgaagggcttctcaaattgcctgagaacagggagtgtgctgattgtaaggccaaaggtccaagatgggctagtgtcaatttagggatatttatatgcatgcaatgttcaggaatccatagaagtcttggggtacacatatcgaaggtccgatcagctactttggacacatggcttccagagcag

SEQ ID NO: 1384 - DNA, 315 bp, Eucalyptus grandis
gcaaaattgggccccttcaaaattactgggaggtcttctcctaaatgcctagaaggatccgatggaagaaatttgcagctacaattcaggaccaggttgtcgctcccgctctttactggaggcaaagtggaaggcgagcaaggtgctgcaatccatgtcgtcttaatgaatgcagatacaggctgtgctgtcacatcaggtccagagtcctctgtgaagcttgatgttgttgtccttgaaggggatttcaacaatgaagatgatgacacttggactcaggaagaatttgacagtcatgtagtgaaagaacgtgaa

SEQ ID NO: 1385 - DNA, 375 bp, Eucalyptus grandis
  misc_feature (1)...(375): n = A,T,C or G
gttctcgagaacccagctccatcccagttcgacccatctgagaacaagtcaacccagatcgtcaaaatcgaatcttgactcgagggagaagcggagaatgacgaagcgcagcgcagccaaggccgcggcggtgcacgagggcgagggagcgaggagcgagctgaagttcagaggggtgcggaagaggaagtggggcaggtgggtctccgagatccgcctgcccaacagccgggagaggatctggctcggctcctacgacacccccgagaaggcggcccgcgccttcgacgccgccgccttctgcctcggccgccccgccgcgaagctcaactnccccggcagccccccggagatctccggcgcggcgtccctctc

SEQ ID NO: 1386 - DNA, 332 bp, Eucalyptus grandis
ccgaataccaccaccgcgaaaatgatgatcggcgagtcccgccaccaccccctccaccccacgacggtttgcatccctcctccgctgtggccgtccctcgacgatcccgccgacgagatctcccccgccttcgacgcggaccacctcgccgccgtcgccgccgcttctagtccgtacgctctgcaggacatcatcgcggcgctgcgccgccaccagtccgacccggactccgacggccccgactcgccggtggacctctacacgtccgatcacttccgcatgtacgagttcaaggtccggcggtgcgcgcgcggcaagtcccacgactggac

SEQ ID NO: 1387 - DNA, 320 bp, Eucalyptus grandis
  misc_feature (1)...(320): n = A,T,C or G
ggaacctttttggtttttttttggcgctcgggcaccggttcgggagtttggctgcaatggctggntgaggcacagaatgaggttgcagtatcaagtgccttgttcaccgttcccaatcgtccttccaaagttgggtcacaattggaagctgtggataatctgaaagagttgcaggtcctggaaaatgaccagacacctaaggtgaggaagccttacaccatctccaagcaaagagagaaatggacggacgaagagcatgagaggttccttgaagctttgaaactgtatggccgcggttggcgtcagatagaagagcatgt

SEQ ID NO: 1388 - DNA, 409 bp, Eucalyptus grandis
ttcagttagtgctcttccaccctctaaagcctcatttcttcgtcgcaacgcagcagtaccgtccggatatacaacctgtccgagcaaaaattgttgaagacgctgacgcctggtatcaaatggatatcttccatggatgttcacccgtcgggcgatcatctcatcgttggtggctacgaccgaaaactgtgctggtttgacctggaactcagtgacaagccatacaagattttacgatatcacacacgcgccattcgttctttggcgttccacccaacatatccactatttgcgtcctcgtcggacgacggcgctatccaggtgttccattccagagtgtataacgacctgatgacggatcctttgatcgtccctctgaaaattctccgaggacatactgtaaaggaag

SEQ ID NO: 1389 - DNA, 313 bp, Eucalyptus grandis
cggactcggactcggccgagtcaacccacgccccccgcgagtcccgaccccccggcgccatgacgcggcgatgctcccactgctgcaacaagggccacaactccaggacctgccccgtccgcggcggcggcgtcggcggcggggacggcgggggcgcggcggccgccccctcctcctcctccccctccacctcctcctctggcgccgcggcggcggcggcggcctcggcctccggcggcggggtgaagctgttcggggttaggttaacggacgggtcgatcatgaagaagagcgccagcgtggggtgcctgtc

SEQ ID NO: 1390 - DNA, 329 bp, Eucalyptus grandis
  misc_feature (1)...(329): n = A,T,C or G
cgagaatccagctccatcccagttcgacccatccgagaacaagtcaacccagatcgtcaaaatcgaatcttgactcgagggagaagcggagaatgacgaagcgcagcgcagccaaggccgcggcggtgcacgagggcgagggagcgaggagcgagctgaagttcagaggggtgcggaagaggaagtggggcaggtgggtctncgagatccgcctgcccaacagccgggagaggatctggctcggctcctacgacacccccgagaaggcggcccgcgccttcgacgccgccgccttctgcctcggccgcccgccgcgaagctcaacttcc

SEQ ID NO: 1391 - DNA, 156 bp, Eucalyptus grandis
cggacccgatgggcgagatggtcgcctccctcaggaacctgcagctcgacaaagtgaagtccatgccttgcggcgggtccacttccggctcgccgagggcctccaggatccgaccggggttctacagtatgcccacgacgccgacacagtccaccc

SEQ ID NO: 1392 - DNA, 555 bp, Eucalyptus grandis
  misc_feature (1)...(555): n = A,T,C or G
gaagctcgacacgcgatttccggctgcaaggatcaagaagataatgcaagcagatgaagatgtagggaaaattgcattagcagttcctgttctagtctctaaagcattagaattatttttgcaagacctttgtgaccgtacatacgagataacacttcaaaggggagcaaagactatgaattcgctgcatttaaagcattgtgtgcnaagctataatgtgtttgatttcctgagggagattgtcagcagggttcctgactatggtcatggtcatggtcattcagatgctgtctctgaggatagaacagtgtccaggagaaggaaggccaccatcgatgatggtaatgacactgatgaggaatccaagaagagcaggatgcttgagatggcccatactggcagcagtggcagaggaagaggccgtggccgaggaagaggccgcgggcgtggtggccgagccactgagagggagactgcgcaccatgaaactgaatcatctgagccgaccacatctctgcaacctgtcaacaagaacattgtcaatcaaggaacagt

SEQ ID NO: 1393 - DNA, 525 bp, Eucalyptus grandis
cgcggatcccgcgagcgtctcccccaagtgccccttcggctacgacgcgccgccggattccggggccatctcccccaagtgccccctcggctacgactcgcagacgttcaagctcggccctctcagctgcatgatctgtcaggcccttctgttcgattgcgccaaatgcgtgccctgttctcacgtcttctgcaaggcatgtatattgcgatttaaggactgcccactctgtggagctgatattgagggcacagaagccgactcgaatcttcagagcacagttgatcggtttatcgaaggccatggtagaattaagaggtcccatgttgagaatgttgataaagaggaagttagcgcgaaggagacggtgatatatgaggacgtgtctttggaaagaggtgctttcttggttcaacaagccatgcgggcttttcgtgctcaaaatgtggaaagtgccaaatcaagactcagtgtctgtgctgaggatatcagagatcagataacaagaacaggcagcacgtcaga

SEQ ID NO: 1394 - DNA, 443 bp, Eucalyptus grandis
caatgtgtgggggcgccatcatctccgacttcatccccaaccagagggcccgccgattgacctcggacttcctgtggcccgatctgaagagatcggccggcaagcagtcgaggcggccggccaggtcggaggtcgtcgatgtcgtggacgatgacttcgaggccgacttccagggcttcaaggacgagtccgacgtcgaggacgacttcgacgacgaggtcgaggtcgacgtcaagcccttcgctttctccgccgccgagcctcggtactccaaaggctcttcaaccaccaaatctgtggagtataatgggcaagctgagaaatctgccaagagaaagaggaagaaccaatataggggaatcaggcagcgtccatggggaaaatgggctgctgagatccgtgacccaaggaaaggggtccgagtttggcttgggacgtttaac

SEQ ID NO: 1395 - DNA, 409 bp, Eucalyptus grandis
ccgaaatggcccagttggtatgcggaggctgccacaccttactcatgtacatccgaggagcgacaagcgttcagtgctcctgttgtcacacagtcaacctagccttggaagcaaatcaggtggcacacgtcaactgcgggaattgcaggatgctcctgatgtaccaatatggcgcacggtcggtcaaatgcgctgtttgcaattttgttacatcagttggtgcttcgtcaagcacactggaacagaagttcaccagctagaattagcaataaacctaccggtcacaggcctcacaactcatggttataagacttctattctactgccgctgccgccgccactgcacatcagcgtcatgaacgcaagctgagaaaatccctactagtttaacttgtatagagttaaaatc

SEQ ID NO: 1396 - DNA, 462 bp, Eucalyptus grandis
  misc_feature (1)...(462): n = A,T,C or G
accatttcttccgaacacaagaggaggcgggtggtggtggtggtgttgctgcttctggtgccgtccacttccttcttcccacctccatcttcatctctccctccctctctctctctgaatctaccgaacccttctcgccgaaggnnnatnagagagagagagagagagagagacgggaagaccatcgctttcggccatcgcgtgcacgagcagtcatgaggagaggcagatgcgccgccgcggccgcgaagagggaggcggccgagatagcgccgccgccggtgccccatgcggctgcggcggcggcggcggaacccagatacaggggcgtccggcggaagtcgctgggccgatacacggccgagatcagagaccccgggacgaagaagctcgtgcggctcggcactttcggctcgccggaggaaagcggcgcgtgctttcgacgccaaggcccgtggcgtt

SEQ ID NO: 1397 - DNA, 407 bp, Eucalyptus grandis
ctctcgctctgcaatttcacaacgagtccgtcagtagtaggacctcattcacagctccagaaacccgaaaagatgagccaatccaccatgttggtagcggaagagaccatattttctccgccccctttgtataaccagcgaaaccatccccacgacggcgcctctgggctcaacccgttcctcacccaggagcactggggcgacctccctctccagctcaacgactccgatgacatgctcatctacaactccctccacgacgccctccactccggctggtcccctttcgactccgtcatcaccgccgtccaccccgagccccagccccaccccctcctccccgccgcttccgtccccacctccttcgcctccgacgagccctgtcgctccacaacgctttcgcctct

SEQ ID NO: 1398 - DNA, 456 bp, Eucalyptus grandis
ccgacctcctctctccacgcggccactgtcccgtcgcgcgaattcgccccgccgtcgtaggagaccgcatcctccgccgccgcggcgatggccccagcttcattccctgcgctagcaacgcatttcaatggaagtatgctcaatgatactaactcatctggtgaaagtcacacacgtaatggaaggccacgaggagatgccaggggaaggaatcaattacttcctcgttactggcccaggataacagatcaagagctacaacaaatctcaggagactcgaactctgtaatcactcctctgtttgagaaaatgttgagtgctagtgatgcaggtaaaattggacgtttagtgctgccaagaaaatgtgccgaggcctattttccgtctatttctcagcttgaaggattgccactcaaagttcaggatgccaaaggctcggagtggatatttcaatta

SEQ ID NO: 1399 - DNA, 474 bp, Eucalyptus grandis
aagttgaggaagtcgagttggagttctcggagggtgaaatggcggcttgattgagggccttgttggggcttgattggaaggatttgatggagctgttcattccaaaggcattgtcttcttgagatgcggacttcaaaccagcagcgtccttgttggatttggtggcggccctgcgagtcgtgccgttctcagacccagcttgctctcggctcttggtctcttccaagtacatttcttcgaccatgggcttccagaggcgaacccgagcgttgatgaaccagttagacacctggctcctggttagtcccgcttgttttgcgagcatgtgtttgtccgaatctttgggatagctgcaattgcaacacgccagaatgttgaatgtacaattgcaactcaaacataaagcgtggtcgtcaaccatgaacatggtttaaattactcctatgatctacagttgatcgaacttacctttgg

SEQ ID NO: 1400 - DNA, 443 bp, Eucalyptus grandis
  misc_feature (1)...(443): n = A,T,C or G
gccccgtcttccncaaggccatcggcgagctccacggccactccggcatcgcgcggctcatgctcttctacgcccgcagcctcttcggcctcgtcgaccaccggaatggcatgggcgtcgcgaacgccggcctcgtgtacttcgacggccacctcctcgcgatgtccgaggacgacctcccctaccacgtgcgcgtcacgcgctccggcgacctcgagaccgtcggccgctacgacttcgccggccagctcgactctccgatgatcgcccacccgaagatcgacccggcttccggcgagatgttcgccctcagctacgacgtcgtccggaagccgtacctcaagtacttccgattctccaaggacggcgagaagtcccccgacgtcgagatccccctggctgagccgaccatgatgcacgatttcgccatcaccgagcgcttt

SEQ ID NO: 1401 - DNA, 481 bp, Eucalyptus grandis
atgagctgagaatagccgaagcatggatgtggagatagcggcgacagcggcgggacgctgaatatactctccttgttcccttccccaacgtcccagaaccccctccagctcgacggcgtcagcggacatgtatccctgccgctcgccacgtccgcatgctgctccttcttcaccactttataactgccgccggcactcatctcggactcggcgctctccgcggcggcttcctctcttgctctcttgcgagaagcatccgccggggccagcgacggttccgtcgacgtcggctcgtcgcggcccgcctcgagcgggaagttcaggatggccttgctcccgcggagcctgaacgcggcgcggtcgtaggccttcgctgcctccaccgccgtgtcgaacgtccccagccacacgcgcgtccccttgcgcgtcgggtcgcgtatctccgccgcgaacttcccccacggccgccggcgcacgcccc

SEQ ID NO: 1402 - DNA, 384 bp, Eucalyptus grandis
catgacccgacgccgccggcgaacgactgggtcatggagaccaggaagaaccactcggtgtcggcggcgtcgggttgcccggtcgggcctacttcagctcgaatcccgcgtgggtcacgggggccgagaggttggggaattgcgggtgccgatagggcccggcaggcgcagatcttcgggttgcagaccatcgcgtgcgtccctgttttgaacggtgtggtcgaactgggttccaccgagccgatctaccagagctccgatctgattagcggaattagggggctgttcaatttccatgaatcggagatgggatgcggtggtagggttttgaatagcgagcatgacccggcgtcgctttggatctgcgatccgccagtcacgatg

SEQ ID NO: 1403 - DNA, 380 bp, Eucalyptus grandis
ctctctctctctctctctctctctctctatctttgatacccaaacaaaacacacggaaaagaaaaacccacaagcacgccatggacaacaatgttgaggaataccagaactattgggagacgaccatgttctaccaaaatgaagagctcgacagttgggtggacgaggcgatatccgggtactacgactcgagctcccctgacggggcggcgtcgaccgctgcttccaagaacatcgtgtcggagaggaaccgaaggaagaagctcaacgagaggctattcgcattgagggcggtggtgcccaacattagcaagatggataaggcatccatcatcaaggatgcgattgactacatccaagagttgcacgatcaagagaga

SEQ ID NO: 1404 - DNA, 432 bp, Eucalyptus grandis
ccaacatcgttctcgagaaccccactccatcccagttcgacccatctgagaacaagtcaacccagatcgtcaaaatcgaatcttgactcgagggagaagcggagaatgacgaagcgcagcgcagccaaggccgcggcggtgcacgagggcgagggagcgaggagcgagctgaagttcagaggggtgcggaagaggaagtggggcaggtgggtctccgagatccgcctgcccaacagccgggagaggatctggctcggctcctacgacacccccgagaaggcggcccgcgccttcgacgccgccgccttctgcctcggccgccccgccgcgaagctcaacttccccggcagccccccggagatctccggctcggcgtccctctcccccgatgagatccagtcggccgcggcgagctacgccaacttcggggcc

SEQ ID NO: 1405 - DNA, 345 bp, Eucalyptus grandis
ccgacctcctctctccacgcggccactgtcccgtcgcgcgaattcgccccgccgtcgtaggagaccgcatcctccgccgccgcggcgatggccccagcttcattccctgcgctagcaacgcatttcaatggaagtatgctcaatgatactaactcatctggtgaaagtcacacacgtaatggaaggccacgaggagatgccaggggaaggaatcaattacttcctcgttactggcccaggataacagatcaagagctacaacaaatctcaggagactcgaactctgtaatcactcctctgtttgagaaaatgttgagtgctagtgatgcaggtaaaattggacgt

SEQ ID NO: 1406 - DNA, 471 bp, Eucalyptus grandis
actgggcaaaatattcctatctctactgcatatatagggctcgggagagagagagagagagagagactgcacagtatagtaatactaaataatacacctcctttagacttgactgaagatacaggcacaaccctagtaagagaagaaggagaaggggaagatgaaggtgagaaggaagctgagggagcccaggttctgcttccagacgaggagcgaggtggatgtgttggacgatggctacaaatggaggaagtacggccagaaagtggtcaagaacagcctccaccccagaagttattaccgttgcactcacagtaattgccgagtgaagaagagggtcgagcggttgtcggaagattgtcggatggtgataacgacctacgagggcagacataaccattccccgtgcgatgactcgaattcatccgaacatgaagggttcaactcgttctagtattgccccaagacaga

SEQ ID NO: 1407 - DNA, 471 bp, Eucalyptus grandis
agcaagcaaaagaggaaaccagataaaagcagacacctcggtttcacgttctctactacagaattccggagatggtgaagagagacagagaggacacggaggtcgaagccctggccctggccaactgcttgatgctcctctcccgagtcggcgagagcaccgactcgccatggctgaaccacaaatcccggcctacggagcggatgttcgcgtgcaagacgtgcaaccgcgagttttcatccttccaggcactcggagggcacagagccagccacaagaagccgaagctgtccggcgatctctttcacctagggcgctccgcggattcctcaccggccaagccgaagacgcacgagtgcgctatatgcggcctcgagttcccgcttggcaagcccttggcggtcacatgaggaggcacagggccgccatggcggagagcttggcgacggccgaaaagcctgtgccggtgtt

SEQ ID NO: 1408 - DNA, 303 bp, Eucalyptus grandis
gcgcccttctcgaatccatacgaggagctggcgaaccacttgctgctggacgatcccgaatcggacctttcggttcacttcccttccttcgcttccgatcccgaaccctgcaactccgctgtatctcctagttttagcgtggatggggatttcctttccgactatggcgacacctcggatcccacgttgaaatacataaatcagatgctcatggaggaggacatagatgacaaaccctgtatgtttcatgatcctttagctctcaagctgcagagaaatccttatacgatgctctctgtccga

SEQ ID NO: 1409 - DNA, 367 bp, Eucalyptus grandis
aatctcaggagactcaaactctgtaatcactcctctgtttgagaaaatgttgagtgctagtgatgcaggtaaaattggacgtttagtgctgccaagaaaatgtgccgaggcctattttccgcctatttcccagcctgaaggattgccgctcaaagttcaggatgccaaaggctcggagtggatatttcaatttcgattctggcccaataataacagtagaatgtatgttctggaaggagtcacgccgtgcatacagtccatgcagttgcaagcaggagacatagtgacatttagtcggttagaacccgagggaaaattggtcatgggattcagaaaggcttcaactgctccctcatctgatcaggaa

SEQ ID NO: 1410 - DNA, 353 bp, Eucalyptus grandis
cattaccaccaccaccaccaaaactctctctctacccttctctctctgcccttctctctctagaatttatggcgatgaaggagaaggcgggttcgggcggcggcgccaggctggcggtgagggaggcgcactaccggggggtgaggaagaggccgtgggggcggtacgcggcggagatcagggacccgaagaagaagagccgggtgtggctcggcaccttcgacaccgccgaggaggccgcccgcgcctacgactccgccgcccgcgactgccgcggctccaaggccaagaccaacttccccctcccctcggagcgccccgtcctcctcctcgccggagccgacggaggagca

SEQ ID NO: 1411 - DNA, 586 bp, Eucalyptus grandis
  misc_feature (1)...(586): n = A,T,C or G
atcaggtcccgcgccactccattcgcgnatctccgacctcctctctccacgcggccactgtcccgtcgcgcgaattcgccccgccgtcgtaggagaccgcatcctccgccgccgcggcgatggccccagcttcattccctgcgctagcaacgcatttcaatggaagtatgctcaatgatactaactcatctggtgaaagtcacacacgtaatggaaggccacgaggagatgccaggggaaggaatcaattacttcctcgttactggcccaggataacagatcaagagctacaacaaatctcaggagactcgaactctgtaatcactcctctgtttgagaaaatgttgagtgctagtgatgcaggtaaaattggacgtttagtgctgccaagaaaatgtgccgaggcctattttccgtctatttctcagcttgaaggattgccactcanagttcaggatgccaaaggctcggagtggatatttcaatttcgattctggcccaataataatagtagaatgtatgttctggaaggagtcacgccttgcatacagtccatgcagttgcaagcaggagacatagtgacatt

SEQ ID NO: 1412 - DNA, 427 bp, Eucalyptus grandis
gcttttccttacctaagatcgccagtagatcatcgctccatttcgctccttctcctccatcgtcttccggttggtgtttcgggaagccatggatcttgagtacccagaagagttcttgggcggtgcccacgaccaccattcgcagatctccaagggcaagcgcacgaagcgccagcggccggcctccccgagcggcggcggctgcgtcggcgccgacgccggcgtggccaccgggagggccggcttctacgtctacgagtgcaagacttgcagccgcgtgttcccgtcgtttcaagcgctaggagggcaccgtgccagccacaagaagcccaagtccacggccgatcctgaccagaaaatcaagccgtcgacggtggtcctgggcttggacgcaattgacgacgaagacgaggggcactccggtaaa

SEQ ID NO: 1413 - DNA, 375 bp, Eucalyptus grandis
gaaagtgacccactggctgccctgtgtaatctggaaatcgacaatgtgaattctctgttcgttttccatggctttggtgatgatgacatttgtggacacatatgcaaacttccagtaggggcagatctgatagagaacctgcatgttagtcagcaattctgagctcgtaggttcttcgcacttgagctttcggtaaattatgctcccggaaaatttcaatttcgccctaagcccttccaagaggtaagcaccaagacgctgaatcgggtcgcccataaccgacaccatttgctccagcatatccattagagctgctgcactagaagtatcggcatcagagattgcccttgccaggcgattaccacttgtttcaag

SEQ ID NO: 1414 - DNA, 369 bp, Eucalyptus grandis
ctcaaaatggacttgtgctgataacagttgggatccagaaagatcatcttgctcggcggatcaagacttgacggcagaagagcttgaagatatgctatctaataataatccagcaccttctaagaaagctaaggctcctaaacaagagaatatggaagcactggaggggctggatactcttgccaacctagcaatcttaggagaaggcgaggtgctcccatcatcttcttcatcatctcaagccacaacaaagcaccctcgacaccgaccagggtgttcatgtattgtttgtatacaaccccccagtggaaagggcccaaaacacaagccaacatgcacatgtaatgtctgtctgaccgtaaagcgcgt

SEQ ID NO: 1415 - DNA, 313 bp, Eucalyptus grandis; identical to SEQ ID NO: 120

SEQ ID NO: 1416 - DNA, 489 bp, Eucalyptus grandis
ctcttcgaaaaccctttctctctcttcgatctctctctctttctctctcctctgtgattgcagatcaggctcccacgccgttccattcgcgcatctccgacctcctctctccacgcggccactgtcccgtcgcgcgaattcaccccgccgtcgtaggagaccgcatcctacgccgccgcggcgatggcggcgccacgaggagatgccaggggaaggaatcaattacttcctcgttactggcccaggataacagatcaagagctacaacaaatctctggagactcaaactctgtaatcactcctctgtttgagaaaatgttgagtgctagtgatgcaggtaaaattggacgtttagtgctgccaagaaaatgtgccgaggcctattttccgcctatttcccagcctgaaggattgccgctcaaagttcaggatgccaaaggctcggagtggatatttcaatttcgattctggcccaataataacagtaga

SEQ ID NO: 1417 - DNA, 372 bp, Eucalyptus grandis
catcggcgagctccacggccactccggcatcgcgcggctcatgctcttctacgcccgcagcctcttcggcctcgtcgaccaccggaatggcatgggcgtcgcgaacgccggcctcgtgtacttcgacggccacctcctcgcgatgtccgaggacgacctcccctaccacgtgcgcgtcacgcgctccggcgacctcgagaccgtcggccgctacgacttcgccggccagctcgactctccgatgatcgcccacccgaagatcgacccggcttccggcgagatgttcgccctcagctacgacgtcgtccggaagccgtacctcaagtacttccgattctccaaggacggcgagaagtcccccgacgtcgagat

SEQ ID NO: 1418 - DNA, 354 bp, Eucalyptus grandis
gcggaatttgaatatcagaggagcacaaagcagccagcagtttgcgtggaggagaatgagttagctgacattttcgatagggttctactttgtgctccgacgggaaataagcctgattctaaatctcctggttctagatttgaggatgcctcaaataatggggcaagccagaatgtacagaaaaatcgcaatcacctgcactttcagccgaacagctctgtgtcaaaaaaccaatgagtgataagaaggaagtcgtggatctgaggaaccttctgtgttcttgtgcacaagcagttgccgtggaggatcgtaaaaatgctaatcaatatctgaagcagattaggcagcactcct

SEQ ID NO: 1419 - DNA, 540 bp, Eucalyptus grandis
ctcaatcggagttgggctggctgtgatatctgtgtccgcggccagggccgccatgctttttgccagcccgatggcgttgtaaatcgctgaaccgtaagaacggcagtaaacaagtgtcgcatgagtacggctttttgccgctgtgtgtcgccatgtgtttcttcaaattgcccttcaatgcaaatcgtttcccgcattgatcacattcgaacgggcgcaccttcgaactcgaatgagatgcgacatgacgcgttagtgcttcctcgaaatgaaaagactttccgcaaagtttacacgggaactcgcgcagcacatcgtactgtgtaggaacatattcgtctcctgaatcattgtccatcgctgtagaatcattttcttcttcttccgtagactcgttcgaattgttgttttccgttgaggtcgtcgcagattcaggagatccagcaggattggagataactggctcatccacaggcaacaacgcgatttcggcgagattttccatcaggatgggctccacagtgaccggagggccccctg

SEQ ID NO: 1420 - DNA, 349 bp, Eucalyptus grandis
gatgggttcaaacagtcttatgggcttggtgggaagagatcatcatcgattcggcctcccgaacaagagagaaagaaaggggttccttggaccgaggaagagcacaagctctttttgatgggtctaaaaaaatatgggaaaggtgattggagaaacatctccaggaacttcgtgatcacgagaacaccgacgcaagtagctagccacgcacagaaatacttcatcagacaactttcaggtggaaaagataagagaagggccagcatccacgatatcacaactgtgaatctcacagagactagaactccttcaccagatgataaaaggccgccttcgccagatccttcat

SEQ ID NO: 1421 - DNA, 378 bp, Eucalyptus grandis
  misc_feature (1)...(378): n = A,T,C or G
ccgaggccgacttcctggccaaacactccaagcccgagatcgtcgacatgctgcgcaagcacacgtaccgcgacgagctagagcagagcaagcggagctacaggggctccgccgcggaacgggccgggaggggcgggttcgggccggggcggacagagtggtcggccgccgcccgggagcagctgttcgagaaggccgtgacgccgagcgacgtggggaagctgaaccggctggtgatcccgaagcancacgcggagaagcacttcccgctgccgggcgggccggcggcgacgatgaagggcgtactgctcaacttcgaggacgtcggcgggaaggtgtggcggttccggtattcgtactggaacagcagccagagct

SEQ ID NO: 1422 - DNA, 358 bp, Eucalyptus grandis; identical to SEQ ID NO: 214

SEQ ID NO: 1423 - DNA, 373 bp, Eucalyptus grandis
catcctatgaagccggaatctgttgaagtactgaatttcggagatagtgggagcggaaggttgctttcgagtcattcacaggtcgcagttgcagaggagcctctgaaccacgtcgaggcggagaggcagaggagggagaagcttaatcagaggttttacgccctcagggccgtggttccaaatgtatcaaagatggataaggcttcactgctccaagatgcggagtcttatatcagggagcttaacatgaacctacaagctgcagagtctgataaggaggatttgaagaagcagttggatgaactaaagaagcgatcatcggataaagaatgtatcccggtggatcaagatcgcaagatggcaaaacctacgg

SEQ ID NO: 1424 - DNA, 425 bp, Eucalyptus grandis
  misc_feature (1)...(425): n = A,T,C or G
gcgaaccgagcgcgaatcggctaatgttcatcggaagcttctcataagaggaggggtccgaggcttcaattttcgagcagggctcatggatcgtcggttctacaccaaccccttcgtgcatgatcaagaagaagaccccgagcccgagcaaggccctgattcgccctcctcgggggaagactccaangtgaatgctatcgagccgtcncaaaagagaaggaagagcgtgaagaancgagtggtgtcggttccgatcgcgggcgaccccgagggatccaagagcaaaggggaggcctacccgccgtccgattcgtgggcgtggaggaagtacggccaaaagcccatcaagggctcgccttacccgaggggatactaccgatgcagtagctccaagggctgccccgccagaaagcaagtggagcgca

SEQ ID NO: 1425 - DNA, 434 bp, Eucalyptus grandis
gcactttcagcttcggcatcctgaaggccggcgagggaggtgatggtgtcgcggacgacgaactcggggtgacgaggcagctgttcccggtgagggaggtggatgcggatatggagtggtgcggcgagtcgtcctcgcttgataagaggagcgatgtcttcttggttggtgcttgtaaggaaaaggaaggtccgaggctggcgatgccgcagcagcggaggaagagcaggaggggaccgaggtcaaggagctcgcagtatagaggggttactttttataggaggactggaagatgggagtcgcacatatgggactgtggaaaacaagtgtatttgggtggattcgacactgcacatgctgcagctagacctatgatcgagctcaataaaattcaggggcttgatgcaacataaatttcaatttgagtgattatg

SEQ ID NO: 1426 - DNA, 414 bp, Eucalyptus grandis
gccagtatgaactctcctttagcccagcttgttaacccaagaaggatgcacacctacgagccatttgaccagttccccatgtggggagacaccttcaaagctgacaaggttaaaaatcttgaggcatcgtcatctgtgattgtgcatgcagtagatgatggattggacaagaagtttgaatatgtttctcatgaatcggcagaaaattccagctccaggagcgatcaagaagcaaatagacctgacaaggtacagagacgtctagcacagaaccgtgaagctgctcgaaaaagccgtctgcggaagaagaaatatgtacaacaactagaatcaagccgcttgaagctagcacagttggagctggaactcgggagagctaggcagcaagggttgctcttgggaaatggattcgac

SEQ ID NO: 1427 - DNA, 332 bp, Eucalyptus grandis
aaaagccctagctaaatcaattaacaagcgctaatcctaaaagcacaggcgaagatttcactgttctggagagagcttgatcttcaggggcgtcgagaagcgcggcttcttcgaggggtgggggctctccacctcgtcgtcgcccgacacgatgaacccggtcgggaactccggcagcgcgggcacgttcaggtcgaagttgcggcggccgctgtcgtatccgagcgcgggcggggccgcggaccccacgccctcggacgtggtgaccccgctgttggcggagccgctggcgccgccatcgtagtggcaacgcttgtgcccgcccagggcct

SEQ ID NO: 1428 - DNA, 318 bp, Eucalyptus grandis
gatccacccaactggccacagcagcaagcaaatcaacaatcaggagcaagcagtgagattcctcagcttccgctgccgccgccccctctgccagccggagggggcggtacaggctccatccggccaggttccatggccgatcgggctcggctggccaaggttccgcagcccgagcctggacttaagtgcccccgatgcgactcgacaaacaccaagttctgctacttcaacaactacagcctcacgcaaccgcgccacttctgcaagagttgccgccggtactggacccgaggaggtgcgtgaggaacgtgccagtcg

SEQ ID NO: 1429 - DNA, 349 bp, Eucalyptus grandis
gaaagcctaaagaaagcagatacaacaggaaaaggaggacaccaatacagatggttttacagaaagattcacaagaactaaaccgtcgctgatcttaggcacgagtcaagctgcttgagtggcgccatccttgcagttgtcgagatccgattcattgactgaagaaggcgccttgataaatgctgactgtcgagatgtttccccgagaaacttcaaagagagtggtgcaggttcattctcagcaagacttagctgagacattccaactatttggtcgatatttaggggttcttttggaattactgggattggctttagcacacggtgatgagatgtctccaccaccctt

SEQ ID NO: 1430 - DNA, 350 bp, Eucalyptus grandis
aacgcccgttctccacaacaagcgactctctctctttctctctctcctccaactaaaatcccaagcctcccaagtctctccgaccatggctccccgggagaggcccaacgccgtcaccgtcgccgtcagccccaggccccagggcggcgccaaggagatccgcttccgcggcgtcaggaagcggccgtggggccgctacgccgccgagatccgcgacccaggcaagaagacccgcgtctggctcggcaccttcgacaccgccgaggaggccgcccgcgcctacgacacggcggcgcgtgagttccgcggcgccaaggccaagaccaacttccccaccgccgacgagctcg

SEQ ID NO: 1431 - DNA, 350 bp, Eucalyptus grandis
aaccgacgacacaggtgacaagaatcacaggttcgaagggggtcaattgggtgttgcagcagcttctgattccagtgacagatcaaaagaaaaagccacagatcagaagactttacgcaggcttgctcaaaaccgtgaagctgccagaaagagtagattaaggaaaaaggcatatgtccaacaactggagagtagcaggctgaaactcacccaactagagcaagaactgcagcgagcccgtcagcagggcattttcatttcaggtagtggagaacaatcccactcaatgagcggaaatggtgccctggcctttgatgttgaatatgcacgttggcttgaagagcacaaca

SEQ ID NO: 1432 - DNA, 317 bp, Eucalyptus grandis
  misc_feature (1)...(317): n = A,T,C or G
cggggatacaggtgctggcaggtttaactacttaaatgataggtattattatcatcacaaaggtcgggttctggctgttaatggacatatgaatggtacttattatggcactggaagagggtcttccggtggaacatacagtactggttgtagtanaggctgtggtggcaggtcagactataagatcacgagaaaagatagggaatctatgcccaacatgagcgagcctcttgttgcctctttgtatgttcctaggaatgataagcttgtgaaaattgatggcaacttgataattcattctattatggcgagtgaga

SEQ ID NO: 1433 - DNA, 370 bp, Eucalyptus grandis
gctcaatgtagtcatcaagaaataaacatcctttagcaacgaaagccagaaagcctgaatctctaacggaaacttacatgcacgtgcatattaggccataaaaacatgacagataaaatacaaaatccctttttctaatgtgtaacatttttcggcagatttctaatgacattactcttcatcccaattttggtgcgcatcgcctccactcctgatcgattcatctctcttatcaccttcagcctgaccatttgttctcttgaccgtacagtggtagttaatcccatactcctgtaccttgaggccagtgcagcagtaattgccgcattatttccagttgatggacgaggtttctggcggtagtatctca

SEQ ID NO: 1434 - DNA, 210 bp, Eucalyptus grandis
gaaaagcgtacgcgaggaggcagcatgcgtggctcaccggagctaatgaggttgatagcaagactttttcgagagctattcttgcaaagagtgctcgtattcagaccgtggtttgcatccctcttctagacggcgtagtgcgatttggcaccacggaaagggttcaagaggacatttcactcgtcaatcatgtcaaaaccttcttcgttg

SEQ ID NO: 1435 - DNA, 557 bp, Eucalyptus grandis
ggtcgttcgacaacaccctgtcgctgctgagccgcgccgagcccgacgaggtgtcgcaggtgccggtcaggccctgcgccgtcaagtccgaggactccgaggagagcagcaagacctcggtccccagagaccgccgtggatgctacaagagaagaaagacttcggatacacagataaggatggatcataatttgattgacgacgggcaccagtggaggaaatatggccagaaagcgattcttaactcggagttcccaaggaactacttcaggtgtactcacaagatcgaccaaggttgtctagcgaccaaacaggtccaaaaggtacaggacgctccgcccctctataggaccatataccagggccaacacacctgcaagaacctcatcctgaaatccccctccctcatcctggactcgcccgagccctggggactcctccatcctcgtcagcttcaacaccagcctccctcccaagcaagacgacaacaacaacagcagcagcaaccccttctcctcttcgactttcccgtcggtgaagcacgagcccgaagctgc

SEQ ID NO: 1436 - DNA, 438 bp, Eucalyptus grandis
  misc_feature (1)...(438): n = A,T,C or G
aatcaacaccnctccccaatttctctctntaagatcccaccccaaccgccaccctcaatctctctctttctctctcttcttcagtgtctgccccgtctgcgacaagggcttcccctcctaccaggccctgggcggccacaaggccagccaccgcaagcacgcctcctccgccgcggccgccgccgggggtgacgaccagccgaccacctcgagcacctccgcggcgacgacctcctccggcgtctccgggaaggtccacgagtgctcgatctgccacaagagcttccccaccggccaggcgctcggcgggcacaagcggtgccactacgaggcccccgcccccatccccgcctccttctccgccccctccgccgccgccgccccggccgccagcggggtgagcgtgtcggagggcgtggggtccacgcacacgcagag

SEQ ID NO: 1437 - DNA, 327 bp, Eucalyptus grandis
tctctctctcttcgtttctcccgtttctctctctctacctctcgccaagaaaccgccaggaaaggaaggaaggtaaaaagaaaagaaaaggaagccatggctccgagagaaaagcccagcgtcgccgccatcccaaaccctaacggcgctaaggaaatccgtttccggggcgtccggaagaggccctggggccgctacgccgccgagatccgggaccccggcaagaagacccgggtgtggctcggcaccttcgacacagccgaggaggccgccgcgcctacgacaccgccgcccgcgagttccgcggcgccaaggccaagaccaact

SEQ ID NO: 1438 - DNA, 360 bp, Eucalyptus grandis
gcgagagctaaccgccaaaattacccagctctcatctttcccacttcaacaaaaataccggaccgaaagaatgtgtatacatatgtctatttgatagcataagaacgggtacataccgtgtcaaggacctccatgaacaaggatgaaaaactggctaatgcctggaaaactcctggcagacccgtttgaagattgttcaaggtacttgtcctcgtcacttccactgccttggaatgtttcagcatttcttcttctaccctcctttggcaggttgcaagttcaagtttcttctcggccagtgggtcccgagcatccagcacctggccattgtcgggcccaggatcagggaaccctacacca

SEQ ID NO: 1439 - DNA, 269 bp, Eucalyptus grandis
ccgaaacggaatcgttcttggggtttgaagcgaagccggtaattatcggtgaaacggcctcgaaaacctcgcaatcaagcaagaagccatcgctgaagatcgcggtgccgagaaaagtcgagctgctgcaattctccaaggcgaatccgatggttcaaggaggttcgaatcaagcacgcgacgagcagaggcactatagaggagtccggcggaggccttgggggaagttcgcggcggaaatccgagaccccaaccggaagggctcgcgc

SEQ ID NO: 1440 - DNA, 351 bp, Eucalyptus grandis
aagaagacgaagcagctcatccgaccatggtgttggtattgcgaacgagaatttgaagatgaaaaagttctcatgcaacaccaaaaggcaaaacatttcaaatgtggaatgtgtcctcgtcgtttgaatactgctggtggtttggctgttcatattcagcaagtgcacaaactcgaaccggaaaaccttccacgtatagaaaatgcactaccaggaagagatggctacgaagttgaaatctttggtatggtgggaatcccagcacctgatgtcgccgactacaaacgacgcaaggaaatcgaactgggactggcagcaggatccatttcacagcctcctgccaagcgtcag

SEQ ID NO: 1441 - DNA, 476 bp, Eucalyptus grandis
  misc_feature (1)...(476): n = A,T,C or G
gatagtccaagctctctgcctctctctctntctgtattctctatcttcatctgcggcgtcttgatcgctctcatctcgctctcgcgaatgttgtctctcgtcttctcctctgtccgccattcaaagatcacctattctttccgtttggtttgcggtgactaagaactctttctctctctcgctctgagtcactcttgctttctcccgacttttctgggattgatgaaaatggcggaaagatcgaacttgtcggacccggaaacaagccccttgaactcaccctccacctcctccgcttcttcctcgtactcacccgacccgcgccgccgggccggctcgcccgccgcggtccgcgacccgttgagatcctccaagcggagcaagcacccggtgtaccgcggggtccggatgaggaactggggcaagtgggtgtcggagatccgggagccccgcaagaagtcccgcatctggctcgg

SEQ ID NO: 1442 - DNA, 315 bp, Eucalyptus grandis
  misc_feature (1)...(315): n = A,T,C or G
gcaagnactttgaacctgggaatcatgtnaaggtcgtttctggtncccaagaaggtgctactggtatggttgtaaaggtggagcaacatgcgctgatcattttgtcagatacaacgaaggaactattaccgtttttgcagatgatgttgttgagagttcagaggtaacatntggaataaccagaattggagactatgagcttcacgaccttgtgctgctggataataccaacttcggtgtcataattcgtgttgaaagtgaagcttttcaggtaggtgacatgcactgaggcaagtctcttggacatgcccttca

SEQ ID NO: 1443 - DNA, 338 bp, Eucalyptus grandis
ctcagccgagcttcagagggaaaccgccatgccctcgcgaaagtcactctgccacacttatcgggaacgataagatggtcatttttgggggtagtggccaaggcgaagcgaactattgaacgacctgcatattctggacctagagacgatgaggtggatgtctcctgaggtaaaaggcgagattcctgtccctagggacagtcacagcgctgttgccatggaaaacaaattagtggtgtatggtggagattgtggcaatcggtatcttggcgatgttgatgtacttgatacggacacaatgacctggtcaaagttgactgttcaaggattttcacccg

SEQ ID NO: 1444 - DNA, 409 bp, Eucalyptus grandis
  misc_feature (1)...(409): n = A,T,C or G
gccaaggccacaaccatcaacaccaccaccagtttggccgtgatcattcttctccctcttcggtcgccatggctggtgcggcagggggtttagagagngagaacggcggaaatgggagatggcctatgcaggagactctcacgctcctcgagatcaggtccgaggctcgactctaggtttaaggaggccaaccaaaagggtcctctttgggacgaacttccggattatgtcggaagaacatgggtatcaacggagcggcaagaaatgcagggaaaaattcgagaacttgtacaagtattacaagaagacgaatgaacgaaaagcgggtaggcaagacggttagcactacaggttctttcgtcaagctcgaagctctctacggagagaacgccaatttgaattccatcct

SEQ ID NO: 1445 - DNA, 304 bp, Eucalyptus grandis
gaactgttgtacatggatggacaggctgacatcaagcagcgccaatcctccattaatgccttcaatgacccaacgagtgaagtgagggtgttgcttgcctctaccaaagcatgttccgaagggattagtctggtgggtgcttcaagggtcgtgttactagatgttgtgtggaatccgtcagttgacaggtaggccataagccgtgctacagacttggacagaagaatgcggtctatatttatcatctgatcacttctgggacaatggatgctgagaaatactgtcaacgggtgtaaaaggacac

SEQ ID NO: 1446 - DNA, 332 bp, Eucalyptus grandis
ggctccccgggagaggcccaacgccgtcaccgtcgccgtcagccccaggccccagggcggcgccaaggagatccgcttccgcggcgtcaggaagcggccgtggggccgctacgccgccgagatccgcgacccaggcaagaagacccgcgtctggctcggcaccttcgacaccgccgaggaggccgcccgcgcctacgacacggcggcgcgtgagttccgcggcgccaaggccaagaccaacttccccaccgccgacgagctcgtcgtcgccgtcgccgccgccgcccgcagccccagccagagcagcaccgtcgacaacgcctcccctccgc

SEQ ID NO: 1447 - DNA, 349 bp, Eucalyptus grandis
gtaaaacaacctccctcagctcctcttcaccactggtttttgagatgatctgtgtgctcggcgccgttgattattatgtcttattctgacttgctgaacctgctgtttgccgtgggcgtttggtgcaccgcgtatattgcggctgccgttctcgagtcgctccgggtcttccatactctctgttcgttttgatttcgatagctgttttcgaaggctaagatgggctacgcacagctggtcatcggccctgccggcagtggcaagtcgacttattgctcgagtttgtatcaacattgtgaagctattgggcggacaatacacattgttaacctagatcctgcagcagaga

SEQ ID NO: 1448 - DNA, 362 bp, Eucalyptus grandis
ccgcaacgaggcgataccatctccggcccgcgtcttgctcttccctctccaatcccatccatccctccatccatccatccatccgcccgaaccctccctttctctctccatctctctcgcgcagcatgattccgagccgagccgccgcggcgcccgacgacgtcccggaagtcgccggatcggcaccgaaggggcacgtacaacagcagcagcagccgcagcaacaggtcggcgccggcagcccaagtacaggggcgtgcggaggcggcggtggggcaagtacaccgccgagatcagcgaccccgtcaagaaggcacgcgtctggctcggcaccttcgcctccgccgaggagggcgccgcgc

SEQ ID NO: 1449 - DNA, 281 bp, Eucalyptus grandis
  misc_feature (1)...(281): n = A,T,C or G
cagcagaccagaccattccattccattccatttcgcattctctactacagactcgcagagatggtgaagagagacagagaggcgcggaggtcgaagccctggccgnggccaactgcttgatgctcctcccccgagtcggcgagtgcgccgactcgaaccgcgaatcgcggtctacagagcggatgttcgcgtgcaaagacgtgcaaccgcgagttcttctcattccaggcgctcggagggcatagaaccagccacaagaagcagaagctgatccccggcgg

SEQ ID NO: 1450 - DNA, 389 bp, Eucalyptus grandis
aagaagacgaagcagctcatccgaccatggtgttggtattgcgaacgagaatttgaagatgaaaaagttctcatgcaacaccaaaggcaaaacatttcaaatgtggaatgtgtcctcgtcgtttgaatactgctggtggtttggctgttcatattcagcaagtgcacaaactcgaaccggaaaaccttccacgtatagaaaatgcactaccaggaagagatggctacgaagttgaaatctttggtatggtgggaatcccagcacctgatgtcgccgactacaaacgacgcaaggaaatcgaactgggactggcagcaggatccatttcacagcctcctgccaagcgtcagaaaatggatcaccggccgatatctcagagcgaattgaag

SEQ ID NO: 1451 - DNA, 381 bp, Eucalyptus grandis
gctgcgctgccccttcccttttgaccgttgctcctcccccttctctctctaccaacgtctctctctctctctctctatctgcactgtgattccctcaccttctcgcagcctcgccatcttccctcctcccaactcctcgctccttcgctcgctcgctacagtccagatatttcgcgatcaatctcgaacagcttacggagatccttatgtatctggtgataagcataagagaacacccttgtgaattccgtttcgatttgcattttaaaagttcatagtgtgaagagagttggaaatctgaggtgcaagatggggtgttcctcatcaaagcttgacgatgaagaggcggtcaagctatgtaaggatcggaagcgattcatt

SEQ ID NO: 1452 - DNA, 381 bp, Eucalyptus grandis
ggcgagctctcttatcttcttcttcctcctgctccacctaaaaccctcgcccggcaaaaccgattcgaggtcgagagtcgagtaaagatgaatgtggagaagcttatgaagatggcgggttcagtccgcactggtggaaagggtaccatgagaagaaagaagaaggctgtgcacaagacaactaccacggatgacaaaaggctccaaagcactctcaaaagaattggggttaatgctattcctgcaattgaggaagtcaacattttcaaggatgatgttgtcatccaatttgtaaatcccaaagttcaagcctctattgcagccaatacatgggttgtcagtggtgctcctcagaccaagaaattgcaagatatcctccca

SEQ ID NO: 1453 - DNA, 378 bp, Eucalyptus grandis
ttttttttttttttttacgcaatggaagaacaaactgttttccaactgaaagtacaaataactcctaatctagaattaggtaaatgcttaaatcctgctacctacaaatgtgaaccacgatgacaaggttcccaacaccaaatgtttggtacgatgtgaaaacttgacgacctgacagcaattagcatataccaacctaacgaaactacgagggggagagagcttatgggcacggcaccagctatatcaagtacgcactctcttattgctgcaggagggacacttgtactgcttgatgtgctcagccctggcgggagtaattttcacgcatttcccatggaaccacttctcgcacatgtcacaacagatccagaactc

SEQ ID NO: 1454 - DNA, 339 bp, Eucalyptus grandis
atgctgctgccacgaacagccgctttacaatcttttacaatccaagggccagtccatcggagtttgtcatacctctggcaaaatatgtgaaagcagtctatcacacaagggtatctgttggcatgcgattcagaatgctttttgagacagaagagtcaagcgttcgtagatacatggggacgataacaggcattagtgatctggatcctgttcgctggcaaaactcacattggcgttcagtaaaggttggatgggatgagtcaactgcaggtgagaggcagccaagagtatccttgtgggaaattgagccactaacaacattcccaatgtatccttctc

SEQ ID NO: 1455 - DNA, 372 bp, Eucalyptus grandis
gtcggtgttaggagattaatgagacagcaaagtaacatgccatcctctgttatatctagtcacagcatgcatcttggggttctggccactgcatctcatgccattgcaactggaactctcttttctgtattctacaaaccaagaacaagtaggtcagagttcattgtgagtctcaataaataccttgaagcacgggcccacaagctatccattggaatgaggtttaaaatgaaatttgagggtgaagaagtttcagaaagaaggttcagcggcacaatcattggtgtaggagacagcatgtcatctggatggactaattctgaatggagatccttaaaggtccaatgggacgaaccttcatcaatcatttgg

SEQ ID NO: 1456 - DNA, 436 bp, Eucalyptus grandis
gcaacgtagtgtttccatagcaactcaaacaacaaaggaacttgttttaaaggattatgctctggagtcagatgagacaagaatatacaaagcagcgcgaaaaatggttgccagccttgctggaagtctagctcatgtgacatgcaaggaacctttgcgtgcttcaatatcaaatcagctaaaaaattcgcttcagggcttgaatctatctgctgaacttctagaccaggctgttcaactggctaccaatgataatcttgaccttggctgtgcagtcattgaacgggctgcagctgataaggcaattcaaaccatcgatggtgaaatatctcaacaacttaacctaaagaaacatagggagggtgttgctccagcattttttgaagccactgtatttggtcaaggttcaatgggcattctcccagaggctcttcgc

SEQ ID NO: 1457 - DNA, 352 bp, Eucalyptus grandis
gcgcggcggaccgggggggagctggaaatgaagtgcccgtactgctcggcgtcgtcgcaggggcggtgcgccaccgccggcggcggccgctcgatcaccgagtgcacctcctgcggccgcgtcgtggaggagcgccaccacttcccctccctccccccccaagccctagccctcgccgacgccgacgccgaccccttcgagtccaccggcttcatcaccgccttctccacctggtccctcgagcactccccgctctccctccgctcctgcctctccttctccggccacctcgccgagctcgagcggaccctcgagtccaccaacccctcctcctcctcctcctcctcgtcga

SEQ ID NO: 1458 - DNA, 364 bp, Eucalyptus grandis
  misc_feature (1)...(364): n = A,T,C or G
gagaaatttaagatcccggtggagttcaacggtttgccggagtttgccccanatgttactcgtgacatgcttgatgtcaggccgggggaagctctcgcagtgaacttcccactccagctacaccacacgccagacgagagtgttgacatcaccaatccaagggatgggctactaaggatggtgaaatcgctttctccgaaagtgatcacattgatcgagcaggagtcgaacacgaacactacaccgttcctgacaaggtttgtggagaccctcgactactacttggcaatgtttgagtccattgacgtgaccctgcccagagacaggaaggagaggataaacgtggagcagcactgtttggcaa

SEQ ID NO: 1459 - DNA, 224 bp, Eucalyptus grandis; identical to SEQ ID NO: 293

SEQ ID NO: 1460 - DNA, 363 bp, Eucalyptus grandis
gggaaaggccctcgaaaatgggttcggttcggcgtcaggcgagctcaggatccgatggcgacccgaggctcggtggggtggccgatgatgaaaggaagaggaagaggatggagtccaacagggaatccgccaggcgctcccggatgaggaggcagaagcagctgggggatttggtcggagaagtggggcaactgcagcaggctaacgctcagctcgcggtgagtatcaatgctgctgcgcagaagtatgccgaggtcgagttggcaaacaatgtcctcagggcccaggccatggagcttaccgagaggctccggtccctgaactcggtactcgagatcgtgaggtggtcagtgggctggtgat

SEQ ID NO: 1461 - DNA, 351 bp, Eucalyptus grandis
gtttgcccaaccatggtccactccctacttcaggagaaaatatcttaatgtctgagcttgcagagtgctgcaaggaattggaagaagggcaccgtgcttgggctgcacacaagaaggaagcggcatggaggttgaaacgactggagttgcagttggagtcggagaaggcgtgcaggaggagggagaaaatggaagagatagaggcgaaaatcaacactctcagggaagagcagaaagcttctttggataagattgaaacagaatacagagagcagctggcaggattgaggaaagatgcagaatccaaggagcagaagctggctgaacagtggacggcgaagcatgtcagct

SEQ ID NO: 1462 - DNA, 209 bp, Eucalyptus grandis; identical to SEQ ID NO: 292

SEQ ID NO: 1463 - DNA, 423 bp, Eucalyptus grandis
ctttggctttccttctccatctctctcgctctctctttgggattcgtgtgttctttcttcttttttgcaccacccgagattttccgaaagctgaagtggccggggagtgaagtttaagagagagagagccatcaccaaaagcccgaagatcatggggagaggaaagatcgagatcaagaggatcgagaacacgacgaaccgtcaggtcaccttctgcaagagaaggaacggactgttgaagaaggcctacgagctctccgtcctctgtgatgccgaagtggccctcatcgtcttctccagcagaggacgcctctacgagtactccaacaacagcataaggtcaactatagagaggtacaaaaaggctaattcagatagttcaaacacaagcactgtcacagagatcaatgcccagtattatca

SEQ ID NO: 1464 - DNA, 379 bp, Eucalyptus grandis; identical to SEQ ID NO: 98

SEQ ID NO: 1465 - DNA, 334 bp, Eucalyptus grandis
catcacacaggttgatttgagaactgaaatcaagatcgtcgtcgtcgtcgtcgttctcgtcggtgctgctcggccgcatttgactcggcgtaacgaacgaagccggttgcgatctagggttgttggggggcgcggaggaagctcgagcctcggtcgtttgttttctttttcttttttgccgatcatggaaggcgtcggcgtcgatcacctggccgatgagcggcagaaggcgcggttcgacgtggaggagatgaaggtcgtctgggccggctctagccacgccgtcgaggtctccgatcgcatggcccgctcgtcgccagcgatccggcctttc

SEQ ID NO: 1466 - DNA, 371 bp, Eucalyptus grandis
tctctctcttcgaaaaccctttctctctctctctctctcctctgtgattgcagatcaggctctcgcgccactccattcgcgcatctccgacctcctctctccacgcggccactgtcccgtcgcgcgaattcgccccgccgtcgtaggagaccgcatcctccgccgccgcggcgatggcggcgctggcccgagctccattccctacgctagcaacgcatttctttggaagtcaggccaggggaaggaatcaattactccctcgttactggcccaggataacagatcaagagctacaacagatccctggagactcaaactctgtaatcactccgctgtttgagaaaatgttgagtgctagtgatgcaggtaaa

SEQ ID NO: 1467 - DNA, 456 bp, Eucalyptus grandis
ggttgccgagttgtgtggagtgccatttgagttccacgctgccgccatgtgtggaagtcaggttgaacgagaggacctcagagtgcgacctggcgaagctatagccgtgaattttccctttgttttgcatcacatgccagatgaaagcgtcagtaccgataatcaccgcgatcggctgctgcgattggttaagagtctatccccaaaggtggtcaccctcgtggagcaagagtctaaaaccaacacgtccccattctatacaaggttcatagagactttggactattataccgcaatgtttgagtcaattgatgtagcgtgccgacgggatgacaagcaaaggatcagtgcggagcagcattgtgtcgccagggacatagtcaacatgatagcttgtgaggagacggaaagggttgaaaggcatgaacttttggggaaatggaggtcaaggtttag

SEQ ID NO: 1468 - DNA, 417 bp, Eucalyptus grandis; identical to SEQ ID NO: 326

SEQ ID NO: 1469 - DNA, 460 bp, Eucalyptus grandis; identical to SEQ ID NO: 100

SEQ ID NO: 1470 - DNA, 408 bp, Eucalyptus grandis
gaggaagccgtcgccgtcgagccgagtcaggaggtcttcgatcgcttcttcgccggcttgctcgttgattcccccgagggcggaccggccgaggcgaccgacggcgcgagcgacaaggagtccaattcatccgacggcggcggcggcggcggcggcgaacgggatgagaagctggtcgtcggagataacgagctttccgaggacgctgatgatgatgatcccgtctctaagaaacagagaaggcagctcaggaataaggatgcggcggctaggtcgagggagaggaagagaagttacgtgaaagagctggagatgaagagcaaatatatggaaggggaatgccgcaggctggggcggttgctccagtgctttgtggctgagaatcaactctgcgtctgaatttggaga

SEQ ID NO: 1471 - DNA, 530 bp, Eucalyptus grandis
gcagaatctgtagtatatatgacgatgaaagggaaatctatcactgcccttactgtaacttgtgtcgtgtgggaaagggattgggcattgactatttccattgcatgaactgcaatgcctgcatgtcgcgctccctttcagttcacaaatgcagacagaaatgcttagaagataactgtcctatttgccgtgagtacatttttacatcgaactctccagtaaaggccctcccctgtggccacttgatgcactcggcatgtttccaggagtatacttgtactcactatacttgtccgatttgtagcaagtcactaggggacatgcaggtttattttaaaatgttggatacacttttggccgaagagcaaatgccagatgagtattctggcaagacccaggttattctctgcaatgactgcgagaagagaggaagcacatcttttcattggttttatcacaagtgccgtcattgcggttcatataacacgaggctgctttgattccaacctaagacgcatatatataactct

SEQ ID NO: 1472 - DNA, 381 bp, Eucalyptus grandis; identical to SEQ ID NO: 102

SEQ ID NO: 1473 - DNA, 567 bp, Eucalyptus grandis
  misc_feature (1)...(567): n = A,T,C or G
cacggcaacaaatggaagacaagacgctgttcttcctcactgagggatcccttctttatacctggtttcaggtagttcttccacctctctaagcaggacttggcatcacggttaaggggagtgttcatgcgctgagacacaaggtgccactcccttgggccatactgtttcacatatgcacgtaacaaggcgtcctcttcagctctccaacgctgtctttccttcattgccaggtgtagacaccacttcccattgcctcaaacttagatctttcatagtgtggctacagaagaagatggtgataatacaaattagaagtaatttctcacatcacaatataatacacgacattttagctgagttaactggtctgagaaaagaaaagaatcccaaggaggagacaggtttatccaaggaaatgcccggcttncatggcttctgcggtccatacgggatggccatcgacggtggtcatagcggaaatgctaacagtttcatggagaattgccagagattgaacatgctcgttccatacgatcagggccatgatcaggagcagatcaacgc

SEQ ID NO: 1474 - DNA, 423 bp, Eucalyptus grandis
tcccgctccattcacagatcagcggcacttcttgcgcagacaattgcagactctctctctcattcaggcgcctgtcttctcaagaattttgtcaaagaaactcctttgttttttctctctctctctctctctctcgaccatggcccgaccgcagcagcgatatcgcggcgtgcgccagaggcattggggctcctgggtctccgaaattcgccacccgttattgaaaacaagaatttggctagggacgtttgaaacggccgaggatgcggctcgagcctatgacgaggcggcaaggctaatgtgcgggccgagggctcggaccaacttcccttacaacccaaacatgtctcagtcttcttcgtcgaagctcctctcggcgacattgacagcaaagctccacaggtgctacatggcctcgttgca

SEQ ID NO: 1475 - DNA, 402 bp, Eucalyptus grandis
  misc_feature (1)...(402): n = A,T,C or G
ccaatcttcactccccctatcccctctctctctctctcaagaactaagagcttactatggaaagcgaacgctacgatgagacgacagagaagcagcgaatcaggagaaggccgcaccagaagccgtacaggggtatccggatgaggaagtggggtaagtgggtggctgagatcagggagcccaacaagcgctcccgtatctggctcggctcctacgccaccgccgtggctgccgcccgcncctacgacaccgctgtgttctacctccgtggcccctctgcccgcctcaacttccccgacctcatcttgcacgagggccaggactcgctgggtgaggtctcagccgcctccatccgcaggcgtgcagctgaggtcggggcccaagtttgatgcttgtccaagc

SEQ ID NO: 1476 - DNA, 269 bp, Eucalyptus grandis
  misc_feature (1)...(269): n = A,T,C or G
gaggagatggcgagggggaagatccagatcaagctgatagagaacacgacgaaccggcaggtgacctactcgaagcgacggaacgggctnttcaagaaggcgaacgagctcaccgtcctntgcgacgccaaggtctccatcatcatgatctccagcaccggcaagctccacgagtacatcaagctcctccacctcaacgaagaagatgtacgatcagtatcagcaggcgctcgaggttgatctctggagctctcactatgagaagatgc

SEQ ID NO: 1477 - DNA, 297 bp, Eucalyptus grandis
ggcaaccagtgtgagatgctcctgctgtcacactgtcaaccttgcaccagttacacctgcttccaatcaatatgctcatgtaaattgcggaaactgtcggacgatgctgatgtatccatctggagctccatctgtgaagtgtgcgatctgtcaatttattactaacgttggtgcgggcaatccaagggtttctgttccaccacaaagaatcgatggaccaccgtcagggacaacaccgtctacttcaacgtcaatgccccaatctactcaaactgtagtggttgaaaaccccatgtc

SEQ ID NO: 1478 - DNA, 408 bp, Eucalyptus grandis
ggctgtctctacaacttcaaatgcaattattggcctcagagacagtagacttgtcccgcagcttgttgaactctgccatgggttcatgtacatgtggaggtcaatgaatgaataccatgagattcagaacaacattgtgcagcaagtccggggccttgtgaaccgagcaaacaagggtgaatctacttctgaattgcatcggcaggcaactcgtgacctcgaatcagctgtttcttcatggcattccagtttctgccgcttaattaagttccagtgtgatttcatccgttcccttcacggctggttcaaactgactctccttcctgttgacaatgataacaatgggacccaggaacactctgatgcctatgccttctgcgatgagtggaagcttgcactaaacatgtc

SEQ ID NO: 1479 - DNA, 317 bp, Eucalyptus grandis
attatatcgtcgtgtctatttcccgaaatatttgcataactactagctgggtcctgtcgtaagccttacaataaatctactattagctgagtattgggtgtcgaataatttgcacgaagccacgaactattggcaatcgatctcatggcttcctcgagcggaacgtcttccgggtcaaccttgatccagaactcgggatcagaggagagtctgcaggccttgatggatcagaggaagaggaagaggatgatctccaaccgcgagtcggcgaggcggtcgcggatgaggaagcagaggcacctggacgatctgatgct

SEQ ID NO: 1480 - DNA, 411 bp, Eucalyptus grandis
  misc_feature (1)...(411): n = A,T,C or G
tgtcattccattgaacactttgccatggaagtgcaagaagatgatgaccaggtttcaccagaaacggtgaaccccaaaacaccctctattgaggaagaatctgctaaaacgaaagcttctggcatcgatcaagaacagggcgattcgtcgaactcgcaggagaagccccccctgaagaagccggacaagatcataccttgcccgcgatgcaacagcatggacaccaagttctgctactacaacaactacaacgtcaatcagccccggcacttctgcaaggcctgccaaagatactggacggccggcggtaccatgcggaacgttcccgtgggagctgggcgccgcaagagcaagagctcagcttcgcattatcgccagatcactctctctgangctcttcaagcaagctcg

SEQ ID NO: 1481 - DNA, 401 bp, Eucalyptus grandis
gtccgtggagccatcgaacgtcccagagccacgggaaaattggctgcgcctgtaaactcgcccagcatgtcctcatcattggacctgaagaattcttgcatggatgcaaatgccaaccctgtgagcattttgcaacctggtgtagtgccacctgaagcctggttacagaatgaaagagaactgaaaagggagaggaggaaacagtcgaaccgtgaatctgctagaagatcaagactgaggaagcaggctgagactgaagaacttgccaaaaaggtggattctctgagtgccgagaatagggctcttaaatctgaaattagtcaactaaccgagaactcggataaattgaggctagaaaatgccacattgatggaaagactggaaaatgcacagggagtgga

SEQ ID NO: 1482 - DNA, 438 bp, Eucalyptus grandis; identical to SEQ ID NO: 286

SEQ ID NO: 1483 - DNA, 370 bp, Eucalyptus grandis
  misc_feature (1)...(370): n = A,T,C or G
cagtcgggtttgccgttagatgataggcccgagggagctcgctccccttctccggaacctatatatgataatatggggattaggatcaatacgagagagtatcgtgctcgtgagcgtctgaacaaggagagacaggacattattacacagattattaagcggaatccagcgtttaagcccccggctgattataggcctcccaagctacagaagaagctgtacataccgatgaaagagtaccccggttacaattttattggacttataataggacctaggggcaatacccanaaaaggatggaacgtgaaactggtgcaaagatcgtcattcgnggaaaaggttcagtgaaagagggtaggttgcagcaga

SEQ ID NO: 1484 - DNA, 335 bp, Eucalyptus grandis
  misc_feature (1)...(335): n = A,T,C or G
gaggaggagagcaggaagaagggcggcggcggtagcggcgagtcaaaccagggagggaaaggctcgaggtcggatcaggagagaaggaaggggattgcttggaccgaggaagaacacaggtggggtcttcttcttgtcaatcggttatttcttctaggcctagataaatatgggaaaggcgattggcgaagtatttcccggaactttgtcgncacaaggacgcctacgcaagttgcgagccatgcacagaagtattttatccgtctgagctctgttaacaaagataggaggcgatctagcattcatgatatcactaccgtaggcagtggagacct

SEQ ID NO: 1485 - DNA, 371 bp, Eucalyptus grandis
gtggttttgccgtcctcggggatggtgaaatcgagcggaggcgcgggggattctgatcattcagatcttgaagcgtccgtcgtgaaggaagctgatagtagcagagtcgttgagccggagaaaaggccgcgaaagcgaggtaggaaacctgccaatggccgagaggagccattgaatcatgttgaggccgagaggcagaggagggagaagcttaaccagcggttttacgcgctccgggccgtggttcctaatgtttccaagatggacaaagcgtcacttcttggcgatgcgatagcgtacatcaaggagctgaactcgaagctccagaccacggaatctgacaaggagaatctgcagaagcaaatggaatc

SEQ ID NO: 1486 - DNA, 373 bp, Eucalyptus grandis
accaccaccagtaccaccacctccctctctctctctctctctctctctccttttccctctgttcgtgttcggtacgattgcgaagcggaaagcgaatgctcctctccggattgccatgaactccaacgcttcctccaacccccagtcgatggccacctccacgacgtcggcgaccactccggcggcgggcggcgacggcggcaagaaggtcaggaagccctacacgatcaccaagtccagggagagctggaccgaggaggagcacgacaagttcctcgaggccctccagctgtttgaccgcgattggaagaaaattgaggattttgtgggctcaaagactgtcattcagatccgaagccatgcccagaaatac

SEQ ID NO: 1487 - DNA, 319 bp, Eucalyptus grandis
gagatggtagttaatacgagcctcggagagcagctcgacggatgatgatgatttgtacaagaaaccaagggaagaaacaataaaggcgaagatcacgagggtttattataggaccgaagggccaggcactagccttattgtgaaagatggacaccagtggaggaagtatggacaaaagatcaccagggacaacccttgtcccagagcttacttcaaatgcgctcacgctccaagctgccttgtcaagaagaaggtgcaaagaagtgctgaagaccaatcggtcatagttgcgacttatgaaggcgagcacaaccatcca

SEQ ID NO: 1488 - DNA, 384 bp, Eucalyptus grandis; identical to SEQ ID NO: 35

SEQ ID NO: 1489 - DNA, 411 bp, Eucalyptus grandis
aagagttgccgcctccggtggatcaactacttgcggcccgacctcaagaggggcgctttctccccacaagaggaggagctgatcatccacttgcattccatccttggcaacaggtggtcgcaaatcgcggctcggttgccgggacggactgacaacgaaataaagaacttttggaactcaaccataaagaagaggctcaagaactcgtcatcatcttcttgtagacactcgccaaacacgagcgattcctccttgtcatcagacgttaaagatgtcatgggaggtctcatctcccttcaggaacaaggactcatgccactttatatggactcgttgtcgtccgtgcaagctttggctcttaaccaggttatcgatccattactaccctcactcaaccaaaggcctcgacct

SEQ ID NO: 1490 - DNA, 396 bp, Eucalyptus grandis; identical to SEQ ID NO: 97

SEQ ID NO: 1491 - DNA, 188 bp, Eucalyptus grandis
tggatgttacttattgttcaattggatttgactccaggtaacccatggacggaggaagagcatcgaaggtttttaattggtctccagaaattgggtaaaggagactggcgagggatagctcgtgactttgtgactacaaggactcctactcaagtggcaagccatgcccagaagtattatatccggca

SEQ ID NO: 1492 - DNA, 461 bp, Eucalyptus grandis
caccggaaacagtccatgttcagaattattctccaattcatcaaatgggcattgatggattctttccagcgcatccctccccacagaatccttcgtaccattcttactcccccaacaatagacccaatttccctcctccgtcccctcaaacttcacagtgggactatttttggaaccccttttcatccctggactactatggataccccactcggagtagtattgatcatatggctatggatgatgagaccagaggattgaggcaggtccgagaggaagaggggattccagacttggaagaagaaactgagcacgaagaatgtgatcaccactcgtatgttgatgaagatagaggcaacagagatgctaatttccccactgaggaagttttagtggaagatgttgatgacaggaagaggatgaggatgaaggaacagacacagctgtgaatctgaggatga

SEQ ID NO: 1493 - DNA, 445 bp, Eucalyptus grandis
gtttcgaagaagggcgagccaataagcaatcggcatcatatacagaagatggtgagctttctgaaatgcttgataaggtattgctcggctgcggtttagggggtcaaatgtcggggtgcacacccgagaacatgagccaatccaagggcccacctggtccaaagggtggcagggttcgccgtaagaagggaaataagagcacagcagacttgaggagtcttctgattctctgcgcccaagctgtctctgctaatgacttcaggacagcttatgaactgctaaagcaaattagacaagattcttctgcctctggtgatggctctcaaagattggcgcattactttgccaatgggctggaagcacgccttgcaggcagtgccggtgatagacaaacctttttctattcttccgaattgcagaagaggacagtagctgataaagttga

SEQ ID NO: 1494 - DNA, 419 bp, Eucalyptus grandis
cggaaccggtggcaattggatcgctcttcctcgcaaagccgggcttaagcgctgcggcaagagttgcaggctaaggtggctgaattacctgaggccagacataaagcatggaggtttcactgaggaggaggatcacgtcatctgcactcttttctttaccataggaagcaggtggtcggtaattgcttccaaattgccaggaaggacagataatgatgtgaagaactactggaacaccaagctgaagaagaagctaatgaagcaactggcttctctgaaaacagtgcctgaaagtaactttgactatcaggtctgcgcacagaactcggcctcaatcgatcctgagaccaagaatcgggaatatgctgctaattcaatgggattccccaagcagaacttcaatccaggaatacccactt

SEQ ID NO: 1495 - DNA, 388 bp, Eucalyptus grandis
ccaatggtgacagtgttaaggatgaccttgatacagatgaatatgaaactcatgccacagttttggataagctattagcatgggagaaaaagctctacgaagaagtgaagcaaggtgagcacatgaagctagagtatcagaaaaaggtggctttgctaaacaagcagaagaaacgtggtgctagtggtgaatccctggagaaaacaaaagcagctgtaagtcatttgcatacgacatacatagttgacatgcagtccatggattcaactgcttcagaaataaaccacataagggacaaacagctgtacccaaagcttgcgcaacttgtcgatgggatggcgaatatgtgggaaaaaatgcgcatgcatcatgataagcaggagtctat

SEQ ID NO: 1496 - DNA, 417 bp, Eucalyptus grandis
  misc_feature (1)...(417): n = A,T,C or G
ctccctcctcctccaaacgtttccgtttctctccaagctgaacatggacaagaagccagacgacgacagtggtaagtcccaagatgtcgaggtgagaaaagggccgtggacgatggaagaggatctcatcctcatcaactacatagcgaatcacggcgaaggcagttggaactccctagccaaagctgctggtctaaaacgtaccgggaagagttgtcggctccggtggctgaactatctgcgacccgacgtccggagaggcaacatcactactgaggagcagctcctgatcatggaactgcatgccaagtggggaaacaggtgagatgcacataagtcacacaacttttcgttacataggttctacaacataatacccatcgatcatattgaaacaaggtccccgtggnatcacga

SEQ ID NO: 1497 - DNA, 404 bp, Eucalyptus grandis
catggacatgctgaagaggacaagaagctcatcaacttcatcctcacccatggccaatgctgttggcgggctgttcccaagcttgctggactgctgcggtgtggaaagagttgcaggctgaggtggaccaattacctgaggccagacttgaagagaggccttttgtccgagtatgaagagaaaatggtcattgacctccatgcgcaacttggcaacagatggtcgaaaatagcctctcacctcccgggaagaacagacaatgagatcaagaatcactggaacactcacatcaagaagaagctcaagaagatgggcattgatcctctcactcacaagccattagtcaccaacaacgacaacacaaccgatcaacaacccccccaagcagcccagacccatcccca

SEQ ID NO: 1498 - DNA, 340 bp, Eucalyptus grandis
gtcagaggcaatcccaatccaaggagttactacaagtgcacaaatgctggatgccctgtgaggaagcatgtggagagggcctctcatgatccaaaagctgttattactacttatgagggaaaacacaatcatgatgttcccactgcaaaatctagcagccatgacactgcagctccctccgctctaagtggactgccaagaacaagatcagaaggtgaaacagtgagcctagatcttggtgtgggaagaagtgcggcatcagaaatggcgtcagctgagaagcagcagatcctccggccaaaccctgtccaaagtcgaatccactatgccagttccgctt

SEQ ID NO: 1499 - DNA, 311 bp, Eucalyptus grandis; identical to SEQ ID NO: 281

SEQ ID NO: 1500 - DNA, 324 bp, Eucalyptus grandis
gttgaatggggattcaaacaatggcttcacaaggcggcggcggcagcagcggtaatgccagaggtggcggtggcaataatggaaaatccactgaagttcagccattgactcggcagaattcaatatacagtctcactcttgatgaggttcaaaaccagttaggtgatttagggaagccattgagcagcatgaacctggacgagcttttgaagaatgtctggacagctgaggccggtcagtcaatgtttatggatgttgagggcacggctgtggctaatcaaaatgctctcccccgtcagggaagcgtttcattaactggtgcat

SEQ ID NO: 1501 - DNA, 380 bp, Eucalyptus grandis
ctctctccctctccctctccctctccctctccttctccctccctctcttcgatgacacggggctagataagtttagggtttcttgagttcttgctctctctctctctctccctgtagagattttttattggagctttttttttttttttggttcctggtgttcttgtcgttggtcatagcaagaaaagagagatggggagagggagggttcagctgaagaggatcgagaacaagatcagtaggcaagtgactttctcgaagcgacggactgggttgctcaagaaagcccacgagatctccgttttgtgcgacgccgacgtcgctctcatcgtcttctccaccaagggaagcttttcgagttttcgactgactcttgcatg

SEQ ID NO: 1502 - DNA, 347 bp, Eucalyptus grandis
gaactacctctgagagtcgacgactcagaggatatgttggtatatggcgctttgtgcgatgcactcagttctgggtgggcgacgccttcggcttcgaatcaagaacttgatttcgaaacgaggactgttgataacgacggcattggtctggagctgcagacgagaccggagatggtgaagcgcgagatgagagcgccagtcaggacggtgcattacagaggagtgaggaggcggccatggggaaaatatgcagcagagataagagaccccaagaagaacggcgcgaggatttggctcgggacttacgagctgcctgaggacgcggcattggcctatgaccggccgct

SEQ ID NO: 1503 - DNA, 312 bp, Eucalyptus grandis
  misc_feature (1)...(312): n = A,T,C or G
ggtttgctcagatgcagcaagagctgcaggctcagatggactaattacctccgtcccggtatcaagcgcggtagcttcacggaccaagaggaaaagatgatcgtccaccttcaggctcttcttggtaataggngggcggccatagcttcgtaccttcctcagaggactgacaatgatatcaagaactactggaatacccatttgaagaagaagctgaagaagcttcaaggccaagcaaatcctgatgatgatgaccataatcatcacccacaagggttcaacgcaacttcacactccaaccccaagggccag

SEQ ID NO: 1504 - DNA, 468 bp, Eucalyptus grandis
agcacggtctcatgagcactcgcaattagaaattaatcctccatcagaagcatcaaaagagccactcccagatgaaccatctcttatgccaaatgaggattcacatcagctctctccatcagaagctaccacttccatggccgaatcctctgatttcgttagttccagtcacaaatgggaagctcttcccatggttctagagaagcccactgaagatgggtataattggaggaagtatggccagaagcaggtcaagggctgtggttttcccaggagctactataaatgtagccatctcaattgctcagtcaagaaaaaggttgagcattctcttgatggtcgtataacggaaattacttacagagggcaacaccagcatgaaatgcctcaagccaaaaggacttcaaaagatggtaacaacttgaacaggagcacaaattctctggctaaatctcaagctgttcttca

SEQ ID NO: 1505 - DNA, 415 bp, Eucalyptus grandis
caagctacaatggtgattcatatcacttgatatttaagaattgcaaccacttctgcaaggatgtttgttacaagctgacagggaaaccgattccaaagtgggtcaatcgacttgcgacaataggttctgcctgcgactgcttccttcctgaaacccttaagatcactgcagtacgtcatgaacctaactgccaaccatgcgaaagtgagaagcggaggttaacaaacaacttcagttgcctgtcttctatatcaatgaggcagaagcagttatctacatcctcattattccttcgttctcccctgagaggctgtctaccgccttgggaactcaaaaggtctaacaatggctccttgaaggaaagatgagaaaatgcccagagtgaaactacatcacaagcgatcatggagcgctg

SEQ ID NO: 1506 - DNA, 512 bp, Eucalyptus grandis
  misc_feature (1)...(512): n = A,T,C or G
ctctattccactcctaattcatgcttttcgtgacaataattttgtagcatgctcaaaactctagagagatatcagaagtgcaactatggagccctggagccgaacgtgtccgcgagagaatccttggagttaagctgtcagcaggaatatttgagacttaaggcacgttacgaagccctacagcgaactcaaaggtattgaagtttctattgtccttttaattaaatgtcagcattcgcgggatgtagttattttcctacatgattggggtctatctgtgtcatcgngaactaggaatcttctgggagaagaacttggccagttaagcagcaaagaactcgagtccttggaaagacagctagatgggtcattgaagcagatcagatcacgaagagtatgtaaattatattcacgaattctatctaagtcacatcctgagttattgngaatacaagttactgnngtcaatcgctgggattagtggtcatcggtctggctaactttagtagcga

SEQ ID NO: 1507 - DNA, 342 bp, Eucalyptus grandis
tctagaacaagatcaacaggcaagtgacgttcgcgaagaggaggaatgggctcctcaagaaagcctacgagctctccgtgctttgcgacgcggaggtcgctctaatcatcttctcccatagaggaaagctgtacgagttctgcagcagctcaagcatgctcaaaaccttggaaaggtatcaaaaatgcaactatggagcaccggagcctagcatctctacccgggaagcacaactggagctaagcagtcagcaggaatatctgaaacttaaggcacgctatgaagccctacagcgaacgcaaaggaatcttcttggggaagaattaggccctctgagcagca

SEQ ID NO: 1508 - DNA, 413 bp, Eucalyptus grandis
atgacctcgaactaaaagtgcgagaactggaaactgtcatgctaggacccagctcagatatgccccacacggttgatatcaacttcttggttggatctggccagatgtctcaggagacggagacattgatggagattatctccaggagggacctaaaggagattctctgtgcttgtgctaaagcagttgaagacaacgacaccttaaaatttgagtgtttaatatcagagttacgcccgatggtgtctgtttccggtgacccgatccaacgattatcagcatacatgttggaagggctcatagcaagattggcaagttcgggaagctctatttacaaagctttaaagtgcaaagagcctgctggtgcagagctgctatcgaacatgcacattctctatgatatatgtccttat

SEQ ID NO: 1509 - DNA, 296 bp, Eucalyptus grandis
attgaatgaaccgggcatttcgggtgaaggaatacaagaagcccgcgccgtgcaaaattcaacagattcggagattgtaggtgatggatttcggtggaggaagtatgggcaaaaggttgtgaaaggaaacccgtatcccagctactatagatgcaccagtgtcaagtgcaatgtgcggaagcacgtcgaaagagcttcagaagatccgagagcctttataacaacatatgagggaaaacataaccatgagatgccactaagaagtaccacacagcaggctcagagtccgatctgca

SEQ ID NO: 1510 - DNA, 441 bp, Eucalyptus grandis
attccttcttctctctcttcgaaaaccctttctctctcttcgatctctctctctttctctctcctctgtgattgcagatcaggctcccacgccgttccattcgcgcatctccgacctcctctctccacgcggccactgtcccgtcgcgcgaattcaccccgccgtcgtaggagaccgcatcctacgccgccgcggcgatggcggcgccacgaggagatgccaggggaaggaatcaattacttcctcgttactggcccaggataacagatcaagagctacaacaaatctctggagactcaaactctgtaatcactcctctgtttgagaaaatgttgagtgctagtgatgcaggtaaaattggacgtttagtgctgccaagaaaatgtgccgaggctattttccggctatttcccagcctgaaaggatttgccgtcaaagttc

SEQ ID NO: 1511 - DNA, 315 bp, Eucalyptus grandis
  misc_feature (1)...(315): n = A,T,C or G
tgatgggaaactctcatgttcttccaatctgaagagcttcttcacaacagctgcgtcacgaggtgatttccagattcaatggtccgagttcgccggacgcggcggcgctgccggtagcatctaaaagcattgacctggaaagaaataggaggaagaagctcaatgaaaggctcttcgcactcagagcccttgtacccaagataagcaagatggataaggcttcgatagtgaaagatgctattgattacatccaagacttgcgtgaacaagaaggnaagatccgagccgagatcgcagagctcgaatctgtaattc

SEQ ID NO: 1512 - DNA, 409 bp, Eucalyptus grandis
gagagacagaagaattagaacgacacgaacaggcaagtgacctactcgaagcggaggaatggcatcttcaagaaagcccacgagctcaccgtcctctgcgacgctagggtttccatcctcatgctctccggcaacaagaagctccacgagtacatcagccccaccaccacgacaaaaaggatgattgatgattaccagaaggctcttgggatcgatctgtggactacacactacgatagaatgcaagaggagttgaggaaactgaaggaggttaataacaattttcggaaggaaataaggcagatattgggccacgatttgaacgagctgagctacgcagaactgcacagtctccgagcagacgatccgagtcttctgtcaattcaagtgcgggaaagaaagtaccatg

SEQ ID NO: 1513 - DNA, 323 bp, Eucalyptus grandis
ggagagagttgagaggcctgagacatataagcagtggcaaatccgcaacacgagggcgggttttaagcccctccccctggatcccgtaattatgaagaagctgaagtcgaaattgaaagaggggtaccttgatgatttcgtggttgacaaagatggtcaatggatgctccaaggatggaaaggtcggattctttatgcttcctcctgttgggaacctgtgtagaatttctccaagtctttatatgcttgtccttttggtgtgagccggggatagtttatgacgaccaaggaggaagctgttggctgattcgtggcaagtaagg

SEQ ID NO: 1514 - DNA, 285 bp, Eucalyptus grandis
  misc_feature (1)...(285): n = A,T,C or G
gtaatggaangccacgaggagatnccaggggaaggaatcaattacttcctcgttactggcccaggataacagatcaagagctacaacaaatctcaggagactcgaactctgtaatcactcctctgtttgagaaaatgttgagtgctagtgatgcaggtaaaattggacgtttagtgctgccaagaaaatgtgccgaggcctattttccgtctatttctcagcttgaaggattgccactcaaagttcaggatgccaaaggcttcggagtggatatttcaatttcgt

SEQ ID NO: 1515 - DNA, 290 bp, Eucalyptus grandis
aaaacactagtggaggcccagaattcggacacgaggttcagttagtggtgatataagttggcaaggcactgacaaacatggactccctagggatgccttcttgcttcccggaatgtcggccccagagaggaaaagagcacgcaacattgggtccaaaagtaaaaggctgttgattgacagtcaagatgctcttgagctgaaaatgacatgggaagaactccaggatttgcttcggccaccgagtgttaacccaagcattgttacagttgaagaccatgagtttgaagagt

SEQ ID NO: 1516 - DNA, 357 bp, Eucalyptus grandis
  misc_feature (1)...(357): n = A,T,C or G
gttcagttagtggtgatataagttggcaaggcactganaaacatggactccctagggatgccttcttgcttcccggaatgtcggccccagagaggaaaagagcacgcaacattgggtccaaaagtaaaaggctgttgattgacagtcaagatgctcttgagctgaaaatgacatgggaagaactccaggatttgcttcggccaccgagtgttaacccaagcattgttacagttgaagaccatgagtttgaagagtatgatgaacctccggtttttggaaaaagcagtatttttatacttcgctccactgggggacaagagcaatgggttcaatgtgatagctgtggtaaatggagaa

SEQ ID NO: 1517 - DNA, 416 bp, Eucalyptus grandis
caagattcttctcccctttcgttccttcgagggtccaaaacttctctctttctctctctgtgtgcggctggaagagagatcttggaggctgtgaatcttggtttctttctcttttggttgacgggtcacataacacgaatctagggttcttgatctttggtgggtgtctttcgaattcgaaggaagaaaagccaagaaacaagaaaatgggtgtggagaccacctccggatcgggctcggaatgcgagacgcgtgtgatgctgaacgtctacgatctcacgcccattaacaattacacccgctggttcggcttcggcatcttccattcgggcattgaagttcatggcaaagagtatgggtttggtgcccatgacttccctgttagtggggtttttgaagtggaaccaaagagctgc

SEQ ID NO: 1518 - DNA, 218 bp, Eucalyptus grandis
attcgaccagtgtcggtaccaaaaccaccacggctctccccatctcctccggccgaaagccctctcaatgaagcgggtgggagtccctccgaaacccaacaagctttacaggggagtgaggcagaggcactgggggaaatgggtggctgagatcagacttcccaagaacaggacacgcctctggctcggcactttcgacaccgccgaggaggctgctc

SEQ ID NO: 1519 - DNA, 337 bp, Eucalyptus grandis
  misc_feature (1)...(337): n = A,T,C or G
ctcaaaccagaagggccttcctctgcggnttcaagatgtaaagggaaaggaagtgggtgtttcagttcagattttggcccaataataacagcagaatgtacgtgttggagggtgtaactccttgcatacaatctatgcagttacaagctggagacactgtaacttttagccgcatggaccctgaagcgaaacttataatgggtttccggaaagcatcaacctctatgatgcaggacagccaactagctgctgtttctaacggtaaccattcaagtgaagctttgatttctggtggttttgaaaatgtacctatgataagtgggtattcgagtctcct

SEQ ID NO: 1520 - DNA, 439 bp, Eucalyptus grandis
gagcgcttggcggcctctgataggagaccggccaactgcttcgaatgatgcaagtgatggaccggtaacaggacttgcactgtcaaagtgccgcacgctcatcggtctgccagaaactcacggagagagagagatggcggagagagaggagaaggggaagtacgacgagatgatgatgaagaaggggagcgacggagggatagcggaggtgaatcccacgccgaagaagggggtgacgtccaaggttgtggactacattgagaagctgatcgtgaagttcatgtacgactcctctctgcctcaccaatacctcgccggcaacttcgctcccgtcgccgacgagacccctcccgtcaccgacctccccgtcgtcggccatctccctgattgcttgaatggagaattcgtccgggtgggccccaatcccaagtttgccccg

SEQ ID NO: 1521 - DNA, 448 bp, Eucalyptus grandis
attggattctaccggaaatttgcgcgccgttgggggttttttgatgtcggaggatggggtcgtcgcagaagtgcatgaatgtgctgtgcgaggagaaggggtcgaccgagtggaagagaggttggcccctccgatctggtcaactcgccaccctctgcgataagtgcgggtctgcatttgaacaggccacgttttgcgaagttttccactcgaaggactctggatggagggagtgcgcttcctgtggcaagcgcctgcattgcggatgcattgcttcgaggatgctgctggagctgctcgattgtggcgggatcaactgcgcgacctgtgcgaaaagttcaggacttctgcctatcgcaagtgatgagaggcctagtgagtttggcatgattaatgttcgtactggtgaactgcaatctagtaccacagacaaccatttcgatagcga

SEQ ID NO: 1522 - DNA, 439 bp, Eucalyptus grandis
cacaacacccccatatcagtaaacacttctcgctgctccagccagcttctgtctcatataaacactagccccacctcactcattatccgcttcgctcctactcaactgctatcgcgctatcccagcgcagacgtcctcccatgaacttctccgacaaggaagtgcagctcgcgtccgaccacccgaagaagcccgccgggagaaagaagttccgggagacccgccaccccgtgtaccgcggggtgcgtctgcgcgactcgggcaagtgggtctgcgaggttcgcgagcccaaaaagaagtcgaggatctggctcggcaccttccctactgtggagatggcagcgagggcgcatgacgtggcagcgctcgcgctgagaggccagtctgcctgcctcaacttcgcagactctgcgtggcggctgcccaagccggcatcgac

SEQ ID NO: 1523 - DNA, 361 bp, Eucalyptus grandis
gcctggtgaacgaagttttcgagagtggccaactttcccatcgcaatagccatttggcccatgtattctgcgacgttgcctgaaccagtaggactcagtgtggtcgaagaaagcgtgtccacgagagattgctgcagagcttccattccctgagataaagcatcttcagcctgttgtgaagattgctgcagattacatatgcccatcaactgttgatccgtcaaaggctccaggtggttccctagtatcttgagaagttcagatgaacggaaaccgcccaaccacatgaaacacctctcggcgggcgtcttccacatgccagagagtatgtggaacacatcggccttcgcacctatgttct

SEQ ID NO: 1524 - DNA, 422 bp, Eucalyptus grandis
ccgactcagcaaagccaaagaaagaaaccagaaacagcagaccagaccattccattccattccatttcgcattctctactacagactcgcagagatggtgaagagagacagagaggacgcggaggtcgaagccctggccgtggccaactgcttgatgctcctcccccgagtcggcgagtgcgccgactcgaaccgcgaatcgcggtctacagagcggatgttcgcgtgcaagacgtgcaaccgcgagttctcctcattccaggcgctcggagggcatagaaccagccacaagaagcagaagctgatccccggcggcctcttccacctcggctgcaccgcggattcctcgccagccaagccgaagaggcacgagtgctcgatatgcggcctcgagttcccgatgggccaagcccttggcggtc

SEQ ID NO: 1525 - DNA, 443 bp, Eucalyptus grandis
ctcgatgatcgacacttgcacgctagtctcggatggcgtgggctggagaggaggtggcggcgactccacggccttgggcttggccccgctgccgccctcgacgatcctcattttcctcttgtcagacccagacccgggcaagcttgctcgggaggaccgttctactgacgaggccgcgcttcgtagatccttcaaactagtcgtcctctgcaactctccttgttttgtcctgtggtcagcctccatttgtcgattcctcgcctcgagatcttggatcttcttcctaagttgcttcacatattctatggtatcccccaatatggaggccttatccattttggtcacgaacggcaccagtgacctcagtataatgaacctctcgttgagcttctcgcggcggcggcgctccgccaggacatggttggcgctgagctcgtcctgcg

SEQ ID NO: 1526 - DNA, 379 bp, Eucalyptus grandis
gtcctccacagttgcggcagattgtaaaagttcccacgcactcgttgctcatatgacccacctgctgacagttcctacacacgacatccctgaaaccgccaccgccaccgccgccaccgccgccaccgccgctgcgcccaacaccaccacctcgctctcccatgacattgcctttaggacactgcctagccacgtgcccagatatgttgcacatattgcagactggctcattcgggcaatcacgtgccaggtggccagttttcctacagttgttgcatgccttctcattcgtacagtcagctgcaatgtgcccttgcttgtagcagttgttgcatagcctcaagtcaccaggaggagcgctgcattctctagcaatatg

SEQ ID NO: 1527 - DNA, 419 bp, Eucalyptus grandis
gttacattgattgacatgtgaacccgtcttttctttttttttcagtagtggcaatccaccaaggcgggcgaggctagtatgatgggctgttgacttgtggcgaattggaacttcgagttctcccggcggcggtgcgcttggtggtggtgatcctcctccgtcggggccggcaggttcaggtccaaggagaggatgttgcgggacttctcggtggtgatggccgcagcagccggcgggttggtggggctcgtcgcgtcggcgctggtggccgtcggcggcggggcggacctgtgccgcctcatgtggccgcccaaggcctgacccgacgcgaactcggacccacatatgttgcactcgtggatcttgggcttgctcgcttgatggagccccttgtggctggccacgtgggcggagagggg

SEQ ID NO: 1528 - DNA, 381 bp, Eucalyptus grandis
cttgcctcacgattgaagaagaaaagagcagcagaagaagcgtttccgttgctatggtcattattttgagcaatcgcagaacgggcaactgagcggttcatcttttcggtggccctataaacaactcggtctcaacatccatagactccgcgcggatttcttcacgaggcggttcgctggagaccggggtcaatcctttgccgcattcaatctcttgaagtagctttctcttttcttccagtagtttccgctcctctgcttttagccgctcaatatgctccctaattaaatggttctttcttgccctgatcttggttagacttctttccaactggttttctgtttgttggagctcctcgaccgaacaggaatccagaccct

SEQ ID NO: 1529 - DNA, 524 bp, Eucalyptus grandis
ctctcagcataatctctctctctctctctctctctctctctctcctgcgctctgcgcaggagcttattcttttattcttttcttcttcttcttttctgttgggtagatttgtaaattagtagggcgaaatccggaccttcttcttcttgctcccctttcttcctgcagctcgaatcgtatcgtttcgtccgtccgtccatccgatcgacatggccgcagtcttccagctcgacggcgaccgcgctgccgacgccctccccgattcgccggttgtcgatcaggagaaaatgccgatcgcgacgagccatgattatgctaatcatgggggggtttgtgcgatatgcttggagaagattgtgctccaagaaactgccctcgtaaaaggttgcgagcacgcctactgtgtgatatgcattctccgctgggcctcatgtaaggagagaccaacctgccctcagtgtaaacatcctttcgacttcctcaacgttcatcgctcgctcgatggcagcatccgtgatacatgt

SEQ ID NO: 1530 - DNA, 185 bp, Eucalyptus grandis
  misc_feature (1)...(185): n = A,T,C or G
gaactggctgtctgggatcaacatagggaagcgagtgcacatgtttatcaaaaggacccagaggtccagatgtagtcctaacagatnggctgtcaatactagcacaggggatttcaccagacatcggctgcccattggttagaagagggattggatgtcgagattcatgtctagaagaagaagaa

SEQ ID NO: 1531 - DNA, 385 bp, Eucalyptus grandis
tcagctagccgctccacccgcttcttcacccggcagttgtcctgcgtgcagcggtagtagcttctgggatgttgagtgttcttgaccaccttctgaccgtacttcctccatttgtacccatcgtccaggacatccacatcgctcatggtcttgaagcaaaacctcggctccctcaccttcctcctcccctttatcttcttcatcttcaaggctgaaacccccatgctctggtggtggtggtgatcacgataatgatcgccatgatctccaccgccggatgaggatctcatgaccaagctgctctggtcactcaactcaccccatgcccagagattcggggttgatctttgcaaagacagaagctgggggcctcccaagagttcag

SEQ ID NO: 1532 - DNA, 153 bp, Eucalyptus grandis
tcggggtcaatccatctggtgcagaacataaacgcctgctttggtcccaggcattttctgcacaggtccacctaggaggaagaagaacatctactggtaaccttctccatttaccacagctatcacattgaacccattgctcttgttcccccc

SEQ ID NO: 1533 - DNA, 417 bp, Eucalyptus grandis
cagaaagtgactcgccctagtgtaggagtagggagaggcttggatgcacattccatttcgcctccttgaagccctccaacggcgcagatatttccttgcttttttaggcaaaatgttgaaaaactggtgataataaaaagaagccctgtttagctataaagggaagccccatcctttctcctccctttctctttcttacctgtccccccctcccctctcctggctctcgctctctctctctctctcagttctttctcggacgggtgtctgtgcgtggcttttgatcggtcatcacctgaggccgcgtctgcaagcaagtgaagaaggaggacaaggaatatggcgagagagaagatcaagatcaagaagatagacaatgtgacggcgaggcaggtgacgtttctaagaaggagacga

SEQ ID NO: 1534 - DNA, 574 bp, Eucalyptus grandis
gtccttgtgacgacaaagttccgggaaatacttcgccaatcgcctttcccatatttatctaggcctagaagaaataacctgtgttcttcctcggtccaagcaatccccttccttctctcctgatccgacctcgagcctttccctccctggtttgactcgccgctaccgccgccgcccttcttcctgctctcctcctcccctaagttactggcggagccatccgagcaagccgaactgtaggacggcagaggcacgcggccagcctctatcctattgacatcttccaccaggtcctcgtagtggagcttaatctcctctagggttttgccgggcacgtcggacgctaccttctcccaccaatccggggaaacctcgaagtgggtagccagggcattctcgaacgccttgtcctgttccttactccacgaggaacaactagggctcactgcttcatcgacagtcatcaaagcaaaacccacacacccttccaactccgaacgacttcacgcgactcagcagcgcgaccaaatgaaactcgacggcaaaatctacggagctatcgaaccaaccccaa

SEQ ID NO: 1535 - DNA, 497 bp, Eucalyptus grandis
  misc_feature (1)...(497): n = A,T,C or G
accgacctcctctctccacgcggccactgtcccgtcgcgcgaattcgccccgccgtcgtaggagaccgcatcctccgccgccgcggcgatggccccagcttcattccctgcgctagcaacgcatttcaatggaagtatgctcaatgatactaactcatctggtgaaagtcacacacgtaatggaaggccacgaggagatgccaggggaaggaatcaattacttcctcgttactggcccaggataacagatcaagagctacaacaaatctcaggagactcgaactctgtaatcactcctctgtttgagaaaatgttgagtgctagtgatgcaggtaaaattggacgtttagtgctgccaagaaaatgtgccgaggcctattttccgtctatttctcagcttgaaggattgccactcaaagttcangatgccaaaggctcggagtggatattcaatttcgattctggccaataataatagtagaatgtatgttctggaa

SEQ ID NO: 1536 - DNA, 454 bp, Eucalyptus grandis
gttcttcctcgtctccatgacgcatccttcggcaacgacggcagcttgcccggccaggccctgtacgggtcgaccccgctttgggtgtcgggcggggaccgcctcgccgactgcggctgcgagagggcgaacaggcgcggattttcgggctcaacaccatggtctgcgtccccgtgatcggcggggtcgtcgaattgggctccacggagccgatctaccatagcccagatctgctgaacaaggtcaggaatttgttcaatttcactggtgggatggaattagggtttggtgggaatggtaacgatcagggcgagagcgatcctttcttcgctctggctcaatgatccggcgggcacggtcgaggtcaaagacagcgccgtcgccgggcggccgccgtcaagggttcttcgaattataacggtagcaatcatgggtctaaatcgattcaactcga

SEQ ID NO: 1537 - DNA, 266 bp, Eucalyptus grandis; identical to SEQ ID NO: 435

SEQ ID NO: 1538 - DNA, 426 bp, Pinus radiata
gcatattctatatgaagtttgtccttatttcaaatttggttatgtagctgcaaatggtgccatcgcggaagcatttaaagacaaagacagggtgcacattattgattttcagatcgctcaaggtagccagtgggtaacattaattcaagcatttgcagcaagacaaggtggttcgcctcatgttcgcatcacaggtgtggatgatcctcaatcagagtatgctcgaggtcaaggattaaatttagttggcgaaagattatcaaagcttgcagaaagctaccaagttcctttcgaatttcatggtttgtctgtttttgggtctgacgttcatgctgagatgcttaagattcggcctggggaagctttggctgtaaattttcctttgcagctccatcatatgcctgatgagagtgtgaatacaagtaa

SEQ ID NO: 1539 - DNA, 447 bp, Pinus radiata
cgacggcgtggtttttacacagtcttcggactcttcttgctcggagtcttcccaaccacggccggcaaagaaatacaaaaaaacccatagcaagaaagcccaagacggctctcagccacgaaggtgcagccattgtcttgtacagaagactcctcagtggagagccggacccttgggaccgaagacgctctgtaatgcttgtggtgttaggttcaaatccggcagactcgtaccagagtaccgcccggcaataagccccactttttttgagcgaggttcactccaatagccacagaaaaatcctcgaaatgagacgccaaaaagaagaagaacaacagaggccagagctaacgtcccagacgtgttcaagcggcgccaacgagtcattttcagacaattctttaccgtctgaagagtcccttctagtttaacccacaggcgtgaaat

SEQ ID NO: 1540 - DNA, 382 bp, Pinus radiata
  misc_feature (1)...(382): n = A,T,C or G
gaggaaatgggtgtcggaagttcgaattcccaattccagtggcagaatttggttgggctcctacgacaccccggaaaaagctgcccgtgcatatgactttgccgtgtattgcctcagagggtccaaggccaagttcaattttccccactctccgccgaaattttcctgcgcttcatttctatcaccgcagcaaattcaaaccgcggcggccaagttcgccgcagaagaattccggcttctttccgaaaatggcgcggcatcctcatcatatggtttggaaaaggnntatgacattaatagcgaacagattacttggaagcagggtgcgacatttggggattcagtagcatttgaaagtatggagaatggcggatctttcaac

SEQ ID NO: 1541 - DNA, 368 bp, Pinus radiata
  misc_feature (1)...(368): n = A,T,C or G
ggtgattggagagggaatagcacggaattttgtcataacacgaacacctacaccaggtagccagccatgccccagaaatattttattcgacagagcaatatgactagaaagaagagacgttccagtctgtttgacatgacgccggtgagttttttcttcctgtcttaaattcttggtgtggtgggcatggaagggattcaggaggcgtcttgggcaaagatcccaaaaattggatttgcaatcaatcatgattcataattgttctgaaaattatgctaagaactaatctcatctttcaaacctcaaatggtattcttttgtttgaagttgnttctaagtttctttaatgtctattcataatttcattt

SEQ ID NO: 1542 - DNA, 370 bp, Pinus radiata
caagcctagagtatgatttggcctaccaggccttctatcagcttcttccttatcacaaattcttgcacttcacaagcaaccaggcaatacaagaagcggtggacaatgcttctaatattcatatcattgacctcgagatcagacaaggccttcagtggcccagcttcatacaatcgctagcccacaggcctggaggacctccgaagctgctcaagatcacagcgataggacaagacgagaagaggctcaaacagacaggtaggcgtttgcttgagtttgcagaatcaatggagattgcatttgcttttcacccggttgttgtggacttggagaacctggatgaatcggccctcaatataaaagcccacga

SEQ ID NO: 1543 - DNA, 404 bp, Pinus radiata
gcggagtatgttcaaagcgggtggtgatttagccgagggcgaagaggaggacgaagaagggcttcgtaacaaacgtggcgattgatcctaccttagcctgaaaatgctgtcaggaggctacgcaaccagatccgacactactactgtcaacaacggatccgctaatggcccaataggaagtgctcccccaagaattaactcgatacaaaataataatccaggagctgtcaggcctggctggggaaccatgccccttcacatgaatccttatcatccccaatcaatgcctcttccgccccccaatggtatgcagggtcagcttgtgtgcagtggatgtagaactcttcttgtttatccgcaaggtgcaccaaatgtttgctgtgcagtatgcaacacagtcactc

SEQ ID NO: 1544 - DNA, 339 bp, Pinus radiata
tatgtctctgcatttcagccagtccatggtttcaagttagttagtccaataaagcagagatgggtcgtgctccatgctgcacaaaagttggtctcaacaagggagcatggtctgccgaagaggatagtcttctgggaagatatattcaaactcatggtgaaggcaattggaggtctctgcccaagaaagcagggctgcgaagatgtggaaagagctgcagattgcgttggctaaactatcttcggccatgtatcaagcggggaaatattacaacagatgaagaagaacttattatcagaatgcatgctctcttgggcaaccgatggtcgataatagcag

SEQ ID NO: 1545 - DNA, 395 bp, Pinus radiata; identical to SEQ ID NO: 508

SEQ ID NO: 1546 - DNA, 390 bp, Pinus radiata
gttctgtcaagacccagcaagaattttgttccgggtttgaaggtgggagaagtgaggtgattcctcctttggaagatgtggaagggtccacacccacgattggggggaggaagagaaaaaatgtttacagaggtatcagacagcgtccatggggaaaatgggctgcggagattcgagatcccagtaagggggttagggtttggcttggaacgttcaacacggcagaggaggccgccaaggcctatgatgcagcggctaaaaggatccgaggtaagaaagctaagctaaattttgctgataactcgtgttctgttaaaaatgacactagcaagaaattgtcaggaaaagaaaggaaagttgtgctcaaaacaccctgcttttgttgttaga

SEQ ID NO: 1547 - DNA, 447 bp, Pinus radiata; identical to SEQ ID NO: 548

SEQ ID NO: 1548 - DNA, 357 bp, Pinus radiata
cagaaatcttgtgatccttgtgattataatcaaaggtcagccttgcaagcaaccgtgaagctgtgttcagttcagagcttctcttgcccgatggattcggagcttatgatggatgccatgcggaacctttcgaataatggattcgctacttcttccatggaaatgttagcggttatgccggatcagattactgtcgaagcaccaccggattcgtcgacgttgttcgcggcaccacgcaatggccgattggcaggggagcggcgggcaaggccgcatccgagtcaagtgctcaaatgccctcgctgcgattcgctaaacacaaagttctgctactacaacaactacaatctctcgcag

SEQ ID NO: 1549 - DNA, 395 bp, Pinus radiata; identical to SEQ ID NO: 414

SEQ ID NO: 1550 - DNA, 634 bp, Pinus radiata
gtccgctcgaggtacgcaaagcacctacgcagcggcattcgaactctctacccatacgtcagatttcacagtgacccttgaatacaggtaagcgtaaggatgaattttgacaatggaggatcacggaggggacgacgcattcagagtgatgtagtagggagacgcacatttcgtcgcagcgagccttatagactataccctaatgataggaatggatatggtcccaggtcttccaggcctattgagctttgtaacaactgcaagcgaacagggcactatgcacgagagtgtccaaatgcttctgtatgcaacaactgtggagtttcagggcacattgcatcgaagtgtccaaaagagcaattatgcaggaattgcaagaagcctggtcatcttgcagctgattgccgcaatgagcctgtctgtaacatgtgtggtaaaacaggtcacatggcaaaggaatgttctgctcatgagctaggacttccaaaatcagcactctgcaagaagtgctatttgcctgggcatattatggcagactgtcctaatgataaggcctgcaataattgtcgccagactggccacttggctcgagattgtatgaatagcccggtttgcaatggctgtggtgaacctg

SEQ ID NO: 1551 - DNA, 612 bp, Pinus radiata; identical to SEQ ID NO: 477

SEQ ID NO: 1552 - DNA, 562 bp, Pinus radiata
gtcatccatattttctttttcagtctgcaatacaaattgttattcgagatacgattgatcatgcttgaaggctatgcctatgcttgcggaaacataccgtgacagctttgagacgacttcgggaggtagcagcgtggatctggtaggaatggctctaccaggtttggcccctaatttgtcttctgcttcagtttcagcttcagcgtcggaagattctgccaagaaaataaggaaaccctataccatcaccaagtccagagagagctggtctgagcaagagcacgataaatttctcgaagcccttcaactatttgatcgtgattggaaaaagattgaagcttttgtaggatcaaagactgtcatacagattcggagtcatgcacaaaagtacttcttgaaggtccaaaagaatggcacaagagaacatgtaccacctcctcgtccaaaacgcaaagcatctcatccatacccacagaaggcctcaaaaaatgttcctgtgtcacagcaagtatcaactgcttttccaactgctgctactcaactagattctggatattatcca

SEQ ID NO: 1553 - DNA, 392 bp, Pinus radiata
caacaatgttccatattgagacctacttttgtccgcattgcctccactccagaacgttgtattttctttaatgcattgcgcctcaatatcttctcttttgattgcacagtcgccaaacccatgcttctataccttgagactaatgcacgagaaagagcaacatctctctcaaccgttgggcgtggcctctgacggtaataacgaagaaattcacgagaaccaagcatcttgcatgttgttccattttcagactttctttggattaccagttcagcccctccaaagccaagttcaatattgacattgagattttcttctgtgggcactatttgcatcccactttcatccgtgtaactgctgctgtagtcataaaagtcggctaaatcactatc

SEQ ID NO: 1554 - DNA, 570 bp, Pinus radiata; identical to SEQ ID NO: 546

SEQ ID NO: 1555 - DNA, 392 bp, Pinus radiata; identical to SEQ ID NO: 521

SEQ ID NO: 1556 - DNA, 364 bp, Pinus radiata
ccttaccgaggggaagcaacgaggtgtttctcttttcccacaagaagatatcaagcaaatagttacacaccaagaaaatccacaatgggtagatctccttgctgcgcaaaggaagggctcaaccgcggggcctggacgaaaacggaggatattattctctccgaatacattcgaattcatggcgatggtgggtggagaagtctccccaaaaaagcagggcttaagcggtgtggaaagagttgtagattacgttggttaaactatcttcgtcccgacattaaacgcggagacatttccccagctgaggaggagctgattattcggctgcaccgccttcttggtaatcggtggtcgctgatagcag

SEQ ID NO: 1557 - DNA, 355 bp, Pinus radiata; identical to SEQ ID NO: 416

SEQ ID NO: 1558 - DNA, 478 bp, Pinus radiata
aaaaagctgtaaaacggtatatatagagcgctctccagtctaacatcttggattgattgttttctgttagaaattcccatcatccctctgtgtcttcctccttttgaatccagagactgtttttatggtggctgtaaatgctgaaataatgcccaaattcgaagggaagtctgcgaaatccctggattcaacattcaagctgttcggcagaacgattgctgtgaaaaatccctgtgatagcagcagcaatggtattcatgtcgatgggattccagctgaagcagtgaattcagcagtccccaaggcttctgaaacgcatcatcatgatgagaaacagaagcagaatgaggattcagaaaaggtgggtaaaaagcccacaaagcttgtgccctgccctcgctgcgagagcatggataccaaattttgctatttcaataactataatgtcaaccagcctcggcattattgcaggagatgc

SEQ ID NO: 1559 - DNA, 389 bp, Pinus radiata
agaaggttggaatggcttagtccgctcatttgatggcgaacagatctttgtggggaggttcagactttgattatgagaacgaagccgatacgaggaagggtccatggactgtggaagaggacatgcagcttggtattgtaaatttgcacggagaaggacgctggaactttctcgccagagcatctggcctccagagaactggtaagagctgccggctaaggtgggttaactatctccggcctgatctcaagcggagcaagatcactcctgaagaagaacgtttgattattgaactccatcgccgttggggaaataggtggtctcgtattgcacaaagtttaccgggaaggacggacaatgaaatcaagaatttctggagaactcgtatg

SEQ ID NO: 1560 - DNA, 354 bp, Pinus radiata
agatgcctcgggtagcagtttacaagagcctgaggagaatgatgaagaacttgctcaagctcttgaagcaagtttgaaaatgggttcacagcaaaatcctcccagtcagcctccatcatactcttaccctagaggatacaggatctgtgctggttgcaatcatgagataggctatgggcggtttttaagttgtatggggaccttatggcatccagattgtttttgttgtgttgcatgtagtctacccatacgtgaacacgagttttccatgtcagggaatgatccataccacaaatcctgttacaaggaactccaccatccaaaatgtgacgtttgccaccagtttatccctac

SEQ ID NO: 1561 - DNA, 248 bp, Pinus radiata
gccaggtgaggcattggcagtcaattttgcattccagctgcatcacatgcctgatgagagtgtctctaccaggaaccccagggatcaacttttgagaatggtaaaaggcctgagtcctaaagttgtaacagttgtggaaagggaaatgaacactaatactgctcctttcctccctcggttcatggaggcactgaattactactcagctgtgtttgaatccttggatgttagcctcgaaagggaaaacc

SEQ ID NO: 1562 - DNA, 346 bp, Pinus radiata
tctgtaagtgcttgagggcttcttgtatcgatgaggccattaacgatgggaagatcttttagttgttggagctgttcaaaagataatggccacgagcgtcttaatcgtggatcttggagtgctgaggaggatacaattttgagtgaacatatcaaaactcatggagttggtcgatggacatctcttcccaagaaagcaggtctaaaacgatctgggaagagttgcagattacgttggtttaactatcttcgttcagatatcaagcatggaaacatttctccggaagaagaggaactcctcatcagattacatcgtctccttggcaatcgttggtcgttgatagcag

SEQ ID NO: 1563 - DNA, 354 bp, Pinus radiata
gtttggggatatatcagaatgcaggacactgctgcttccacatctacacagcatcagtcaacaagtgaaaaatcttcaagttcagcagctccagccccatttagacaagccaaagatgcaattgagagcgatgatgatatcaggagggttcctgaaatgggaggaatgcaagcaggtccatctacatgtgtgcctatgaggttagacaatccccaacctagcacaggcgttgttgcccacaggaagagagggagagcccctgcagacaaggaacacaagcgtctcaaaagattgcttaggaacagagtatctgcccaacaggcaagagaaagaaagaaagcatacttaaatgat

SEQ ID NO: 1564 - DNA, 324 bp, Pinus radiata
tagctgccgagtgtacgaatgagaaggcatgcaacaactgtcgcaagaccgggcatcttgctcgtgactgcaccaacaacccagtttgtaatttgtgcaatatatctggtcatgtggccagggagtgccccaaggctcgcattttggatggtaataggggtggaagatttattgacgataggcgtggaagatttaatgacataatctgtaggacatgcaacgagccagggcataccagtagggagtgcactggaattctcatctgccacaacttgtggtggccgtggacatgttgcatacgaatgccccctctggtcgtgtgat

SEQ ID NO: 1565 - DNA, 421 bp, Pinus radiata
aacggaaacaggaccggactctggctgctgccctccctcattaaccattcctgtctgccgaactcgaggtggctgttagtgggaaatgccatttttatacatgcctccaaggccatcgggagtggagaagagatcactattccttattttgatgttctggctcccttgttacggcgccaagctgactgtaagaactggggtttcaagtgcaagtgtaagagatgcattctggagcactcattcaggaaattcctagaacctataattgccctaaagtttgagcaattggatgaccaagcaaaagaattgcttgctggattggatcatcgggaaagtgcagaaatgagtcaccgggaaaatgcagaatttgcaatgtttgttccagaggcagaggagatcatccggagttcccatgtgttga

SEQ ID NO: 1566 - DNA, 390 bp, Pinus radiata; identical to SEQ ID NO: 524

SEQ ID NO: 1567 - DNA, 353 bp, Pinus radiata
gtctaggggaaaagctttgaaattatttgggtttgagtttagagggtcagaaggtggatcatttgaagggactaatggttctgatcagccacaagatgggactaatatattaactgcaggtgaagcatccactgagccagtggaggaagaactagtgattgaggccaaaaatggagattcagggaaattagaagatgtgggtagtccagtagaggctggagaaagtggtagcactagcaattgcctgggatcatctgctcaagaaaatcggaaatatgaatgccaatactgttgcagagagtttgcaaattcgcaggctctcgggggccatcaaaatgcgcacaaaaaagaga

SEQ ID NO: 1568 - DNA, 436 bp, Pinus radiata
agtattgaaattcccctgttttgatctgatagctatggatctgatggagtcttttgaggcaaaggggaagggagagaagaggagaacggtgaggggaaaaacccagttgaagaggattgagaacgggaccagcaggcaggttactttttgtaagcgcaggaacggtctgctgaagaaagcttacgagctctcggtgctttgtgatgccgaagtggcacttattgttttctctccaagagggaagcgctatgagttcgctaatcccagcatgcagaaaatgttggcacggtacgaaaatttttcagaaggaagtaaagcaacgagtacagcaaaagagcaagatgtccagggtttaaaacgacaaattgcgaatatggaagaaagggttgaaattcttgaatccatgcatagaaagatgttgggggatagctggcat

SEQ ID NO: 1569 - DNA, 349 bp, Pinus radiata
gttcaattttttcacttgcagtggaaatagaagcctgcaggtacctctaggctaccggagttcaaatcccgcacgatcacactcccttcttttaacattccgagttcgaatccccggaaacttctcgacatggttaagccctcgcaaaaacagaatatccatgtcaatggcaagccggaaagccgctcactgatgtcgcggcaattcaagggaatccggctaaggaaatggggaaaatgggtgtccgaaattcgaatgcccaattgcagggccaaaatttggctgggctcctacgaatccccagagaaagctgcccgcgcctatgactttgcagcgtattgtctgagag

SEQ ID NO: 1570 - DNA, 580 bp, Pinus radiata; identical to SEQ ID NO: 541

SEQ ID NO: 1571 - DNA, 469 bp, Pinus radiata
gttgacggagcaggcagagcgcattggtcgcgtcaagattggcagcaacggtttgttgctgttggcgacgcggttaaaggtggcagcatttgacctggaaacacatgggatttttttcagagtggaagaagaagcagatgatgagattatcgttgaatctgtagatgttaaccgggacagggttttggtagcgtcaaatgacggtaatgctagggttcgtcgaatgaggacactcgaaaacatatgcaccttaccgtttgacggtttaggcggagcagatgataacagtagcggtagtaataacaataacaatagtagaaaaattcttgggactttgaatacatggctggcatttgtctgcattgacggtgtggtgcacgcttgggacgctgacagcggcgcacgactctaccgtttggtagaacaagtcggcgatgtgttcgatttggtatcagacaatgaacacgtg

SEQ ID NO: 1572 - DNA, 337 bp, Pinus radiata
gggaggcagagaaggaacggaaaaaggagtgaatttttgtgggtttgtgtttattgggaagatggggtgtgtgtcgtccaaggtggagaatgaagaattagtgaaaagatgcagggacaggaggaggctaatgaagcaggcagtgaattccaggcacaattttgctgcagcccacattgcttatttgagggctctgcaaaacacagggaatgctctggtacaatttgcggagggggaatccagtgctatgaatggcaatgctattgaagaagcggccacaccaatgccagcgaccccattaacagcatctcatcgccatcccatgaaattccatcct

SEQ ID NO: 1573 - DNA, 341 bp, Pinus radiata
gttctatactgtcacggtgtttcttttaatggctcgttcctcctccctcaccatggagaagaatatgtactgtagttctactattctggagtatgacactgaggaagggagtagtttagattgggaatgcgacatgtccgaggaagaagaagatcttataatcagaatgtacaaacttatcggcaacaagtggtcgctgattgccgggcgcattcctggaagaaaagcagaggagattgagaggtactgggccatgagaacccaacaattgtgcggcggcgatgatgctattttgacgaagaaacagcagaaaaccaatatgatatcgattaagtaccgcg

SEQ ID NO: 1574 - DNA, 479 bp, Pinus radiata; identical to SEQ ID NO: 540

SEQ ID NO: 1575 - DNA, 402 bp, Pinus radiata
attgatgggatcaccccttggaggaggacttggtctttcccctagaatgggtggagggattgggaatggcctcaaggaggattgggggtgggcttggcgggtctcggagctactgcgcttaccattggagcagcatctcccgccaaccagctttcttctgatggtatgggcaacagccatggagacaactcaacagtatcgccaattccttatgggttggacgtaagtgtaagaggcaggaaaagaggtggaccggtggagaaagtagttgaaagaaggcagagacgtatgataaagaatagagaatcggcagcaaggtcgcgagctagaaaacaggcatatacccgttgaattggaagcttgaagttaccagacctcaaagaagagaacaaggaattgcga

SEQ ID NO: 1576 - DNA, 355 bp, Pinus radiata
cttcagccgcttggagtccacttcccagctgctacatccgttgtcctccagcgcactgctgccatcgtgggagaagccgtcgctgctccgcttgcgagcggcgtctaagctgctgatttcgtcgtccaggtggacaacgatgcccttttcggggtcccggcagcgcctccgtagcgtggagttccagtggttcttgatcgcgttgtcggtgcggccggggagggctcgggcaattgttgcccatttgttgccgtgctgcgcgtgggcctgcagaatagcagcatcctcggacggggtaaaaggtctgtgctccacctgagggctcagctgattgcaccaccgtagcctgcacgat

SEQ ID NO: 1577 - DNA, 463 bp, Pinus radiata
gtgaaacttgagcaatttaacttgattctgtggagactgatgctgatgagaaaattgaggacaagggaggaagcttgaaaatgactcgccaccagaaacgcaaaattgatgaaatccacgttgaagagggtcagggtcatgaggattttgatcctgctagccttcgagagcatgaggagtttacgaaagttaagaacatagcaaaggtagagcttgggaggtatgagattgagacgtggtacttttcacctttccctcctgaatacagccattgtgagaagttattcttttgcgaattttgtctcaatttcatgaagaggaaagaacagcttcaaagacatatgaggaagtgtgatctgaagcatccacctggagatgaaatatatcgcaatggaaccctctccatgtttgaggttgatggaaagaagaacaagatatatgggcagaacctctgctatctggc

SEQ ID NO: 1578 - DNA, 343 bp, Pinus radiata
  misc_feature (1)...(343): n = A,T,C or G
gaaacaccaaggttgggatntctagaacgaagcatacgacaacagcgcgcatttcaccacttaggattgatggagcagcacccttggcgaccgcagagaggacttcctgaacgctctgtntctgttcttcgtgcatggttgtttgagcattttctgcacccgtatccaactgatgcagataagcatatattggctaagcaaactggccttacaagaagtcaggtatcaaattggtttataaatgccagggttagactatggaagcccatggtggaggagatgtacatggaagaactcaaggaagaaaaagtggaccaaggtacacacaattctgaagctgaaa

SEQ ID NO: 1579 - DNA, 530 bp, Pinus radiata
cggcaagtggggagtgccggacaatttgtatggagctcaggaagacagtggtggaagtagtgttaaacagaagaacttgaaggatggggaccaattcaccagtagtgatgaagctgacagtgaggtcaatgaattcaacattatgaaaagaagcaattcaggggttggatatgaagataacaaaagaagtggggggcaaggtgatggcaatcagtacaggtcacgtcactctcggagcatctccatggatagcattatgagtaagatgcataacttcagtgaagacttggaacaggaaccgtctcaaggtcggaatgtcagacactcccatagcaattcgatggatggaagtacaaatttcaatgtggaattcgggaatggggaattcagtgcatctgagatgaagaagatcatggccagtgagaaactggcagagcttgcaacggtggatccaaaacgtgtcaaaaaggatattggctaatcgccagtcggctgcacgctccaaggaaagaaagatgcgctatatctca

SEQ ID NO: 1580 - DNA, 561 bp, Pinus radiata
ctccactaactccttcatttcaacactcacagcatcggatccgtgcgataaaacttctatactggttcgatctctcagcccaacagccgtaggccgaccgccattatcgtcctctaagaaagcttgcatccatggaaaacctgacgatctctcaggaaagtgtaacactacaggcggacgctgccactgctcttcaaaacgcaagaagtccagagtgaaaagaactatcagagtacctgcagtcagtgcaaaattggcggacattccatctgatgaattctcatggcgaaaatatggacagaagcccattaagggctctccacatccaagaggctattacaaatgcagcacagtgagaggttgccctgcaagaaagcacgtagaacgcgccctggacgatccaaacgtattgattgtaacatatgagggcgaacacagccattctcattctggatctgaaaacacaggcctggtactggattcgtgagacccacatacagacaaagacattattctagttttatattacgctacagaatccgccattattacagcgggatg

SEQ ID NO: 1581 - DNA, 357 bp, Pinus radiata
cccagaacggcataagcactgacaaaggattttaagatctgtgcgatgtgggatatggatttgccttcccaagggtcaagtttgagttcatctggttcagtttggactatacaacagaacaaaatttttgaaaatgctctagctgattttgataaagacaccccagataaatgggagaaagtggcagccaggctgcctggaaaaactgctacggatgttagaaagcattatgaagatctcgtggaagatgttacttgtattgaagctgccgcgttgccctacccacgtacagtaactcttcctgttcacatgaatggttagaaaaatcaggcgctatgcacggattgaagcaacaat

SEQ ID NO: 1582 - DNA, 522 bp, Pinus radiata
gcgagctaggcggtacgtaagcaggagagagatttattttcttgtgtttcagagtttttgcagtgcgtctaaatggcggtagaaaccatgcggatgtcgagggtgagactaggaagttgcgaggacgaatcccgggccgtcaaagaaacccatttcaggggcgtgcgaaaacggccgtgggggagattcgcagcggaaatcagagatccatggaagaagactcgagtgtggctgggcacattcgacactgccgaggaagccgcccgtgcttacgatactgccgccaggagattgcgcggccacaaagctaagaccaatttttctgtcaccgccgactaccacaataacgctggtgcgcccgcactttcctggactcaggcgctgcatcctcagcagccggatctgaacgccgcggcttttgctttcgtatcaaacaagagacgtgaagtttcctctggaagcgaccggctcgagttcgaatctcccaacaattctcttcacgctgcacctctgagcaggcgg

SEQ ID NO: 1583 - DNA, 530 bp, Pinus radiata
ggcaggagttcccgcaagctttaagaacccttccctttgtgttagacctccaggttcctcaggtacgcagtctctacatcgcgtgacgttcaagggagacgggatattcagagtccgatcgccgccatggccgtagacaccatacagatggcgagagtgggtgtaaaaatgaagatcggaggaggcggctgcgaggaagaggcgtcctcggctgtgaaggaaacgcatttcagaggagtgaggaaaaggccgtgggggagattcgctgccgagatcagagatcccttgaagaaaaccagagtctggctgggcacttttgacactgcagaggaggccgcccgagcctacgataacgctgccagaaatctccgcggggccaaggcgaaaactaattttcttctgtctccccacaatgacattagcaccaagggcagcagcagcgccgccctgtcgagcaatagcaccaccagcgccgcctctggtcaaatccaaaaccaatggcccctgcggccatatttctattcgaatca

SEQ ID NO: 1584 - DNA, 435 bp, Pinus radiata
gcattgctctgctcgaacacatagtagtctgatctctgcgcttcgagcactacgagaattgcttcaccattaccttcatcatccaccaatggcggccgaagattttaatgacaagaatgctgtattcagaaagctccgggccaaacccgacaacaagatgtgctttgactgtaatacaaggaatcccacatgggcatcggtcacttacgggattttcatctgcctggattgttctgcatctcatcgtagtcttggtgttcacattagctttgtcagatctgtaaacctggactcatggactcctgaacagttgaaggtcatgagctttggtggcaatggccgaggacatacattctttaagcagcatggttggaatgatggaggtaaaatagaatcgaaatacacatcaagagcagctgagctatatagacagct

SEQ ID NO: 1585 - DNA, 362 bp, Pinus radiata
gaaagacttgcagcttacatggtggagggtcttgctgcacgaatagcatcttcaggaaacggaatatacaaagctttgaattgtaaagcgccaccaagcactgatactttatctgccatgcaaatattatttgaagtttgcccatatttcaaatttggttgcatggtggccaatggtgcaatttgtgaagccttcaaggatgagcagaaggttcatatactagattttgaaattgggcagggaagtcagtacataagcctcttaaatgtccttgcagaaaggcctggtgggcctccacatttgcgcataactgcagtagatgattctgaagatgtaagatatattcctgggggattggataa

SEQ ID NO: 1586 - DNA, 362 bp, Pinus radiata
caggagccgaaaagacaaactacgaacaaaatccctgtccaaataacaagaaaaatggcagagtcacaggggtcgtctacacattacaaaccgtacaggcagaagcagactctctcaggccaccgtggagcggtctcgtgcgtgaaattctcaaaggacgggcgtctcctgggcagcgcttctctggacaaaacaatatgcatatggtcggcctctgcttcttcttctacctctgcattcaagcgggagctccacggccacagcgagggcgtctccgacttcgcgtggtcgtccgactcccgctatatctgctcggcttctgacgacaagagcctccgcatctgggacgtccacacgggcga

SEQ ID NO: 1587 - DNA, 389 bp, Pinus radiata
cttcggtctgcctgggtgcgtttctgaatttctcgccaagtgagtgagtcgatccagccttgtttcagcgaaacctgttgtggttttgggttttcttggcttttgccttttcattctttgtttccttggattcgaactcgagatctcctgaatattatggcacaggagagctggaaccaggaggagaccgggtgccaagtcccggaagggctcatgcgctgtgccaacaactgtggcttcttcggaagtccggccaccatgagtctctgctccaagtgttaccgcgaattcgtgctgctcaactcccctaaatcgtccttcgataagccgcaacagcagctgccgatgcaggacgaggtatctatcccgagacccgacgttgctgctga

SEQ ID NO: 1588 - DNA, 416 bp, Pinus radiata
  misc_feature (1)...(416): n = A,T,C or G
cagcaatggcggcccagactatcatcgctgcctctatggcatctcctctaacattatcaaatggccactatccgtttnagtccgagttcaaggggtccgtggttcgaatcccgcagagggcattttccttcgcgcctgcagcccgggcgctgaccgtcgtcgcataggccaagaaggccgttgccgcgctcaaagggaattcacaggtcgagggtgttgtcagtctctcgcaggaagacaggggtcccacaacagtgaaggtccgtttgacaggactgactcctgggaagcatggctttcatctacatgagtttggtgacacaaccaatggctgcatatcaacaggagcacattttaatccaaaaaaattgacacatggtgctcctgaggatgatgtacgccatgcgggtgacctg

SEQ ID NO: 1589 - DNA, 507 bp, Pinus radiata
tgcgagtcaatgttctaatgatcccatttgtcacacatgcggcaaatctggtcacctctccagggattgtacggctccagagcttccccctggagacattaggctttgcaacaattgttacaaacaaggacatatagctgccgagtgtacgaatgagaaggcatgcaacaactgtcgcaagaccgggcatcttgctcgtgactgcaccaacaacccagtttgtaatttgtgcaatatatctggtcatgtggccagggagtgccccaaggctcgcattttggatggtaataggggtggaagatttattgacgataggcgtggaagatttaatgacataatctgtaggacatgcaacgagccagggcataccagtagggagtgcactggaattctcatctgccacaactgtggtggccgtggacatgttgcatacgaatgcccctctggtcgtgtgatgctgcgggacatgcgcaggcattgatgctgcagtttctacaccacctgact

SEQ ID NO: 1590 - DNA, 370 bp, Pinus radiata
cgatattttatgttgttgaagttggcaaaaggagcattggtcttaaaaggtcaaccctgtaaggtcctgatcaaccctttgacaagataaaaatggacagaaattcagaattttatgaagagacatcgtcacagaaaaatcaggcatccggatcaagtgatggaggtagttttgattgcaatatttgcttagaattagcccaagatcctgtggtgactcaatgtggtcatcttttttgttggccttgcctataccaatggctacagatgcactccatatcaaaagaatgccctgtttgcaagggcggtgtagttgaagagaaggtaattcctttatatgggaggggtaaggtgggttctgctgatccaag

SEQ ID NO: 1591 - DNA, 308 bp, Pinus radiata
gttcccaggagaggagagcctcagctgtctcgatctggcgttaaggggttacagaagaagaatttcgaagatggttagatcttcttgctattcaaagcaaggtcataggcgtgggatttggacccctatggaggatatgattctctctgaatacattcgaattcatggcagtgatggatggaaaaatatcgctaaacgagcaggtcttaaacgatgtggaaagagttgcagattacgttggttgaactatcttcgccccgacattaaacgtggtaacatttctcctgatgaggaggacctcattatta

SEQ ID NO: 1592 - DNA, 361 bp, Pinus radiata
ggatattctggtgtgcattgctattctggccatgaattttggcagaatgtgcgattagggtttgattctgggtgttcttttcaggtacagcagagatttgaaggggatttgaatttgaatcatggaagttgagtgctgcagccctcggtcttccgctcaggggtgtgaggttgacatgaagccaacgatggtggtggaagatacgcttaatcaaggatgcatgcaatatggatgttcacactaccgccggagatgccaaataagggctccgtgttgtaatgaagtctttgactgtaggcattgtcataatgaggccaaaaattcaatggatgtccatccacttgacagacatgatgtaccg

SEQ ID NO: 1593 - DNA, 378 bp, Pinus radiata
  misc_feature (1)...(378): n = A,T,C or G
accaagctcatcacatggcgtccgagaaggaagctgctcttgctgccacaccaccagaagatgataaacctacaatatttgacaaaatactgcagaaggagattcccagtacagtggtttacgaggatgagaaggtacttgcattcagggatatcgcaccccaagcacctactcacatcattatcatccccaaagtaagggatggcttgactggcctatctnaggcagaagagaggcatgaggatattctaggtcacctgctatacactgcaaaagttattgcaaagcaggaaggtttatctgatggcttcagaattgtcattaacgatggtcctactggatgccaatctgtgtaccatttacatattcatctactcg

SEQ ID NO: 1594 - DNA, 333 bp, Pinus radiata
gattgacggatcgattgcaatggcgtttgcggaagagtattccgatcgcgatgccgtatttcgaaagctgaaggcgaagtctgaaaacaagatttgttttgattgcaatgctaaaagtcccagttgggcgtccgtgacatatggagtattcatttgtcttgattgttcagcaatgcatcggagtcttggtgttcatgtcagttttgtgaggtctacaaatctcgatacatggaccatggagcagttgaaattgatgagctttggtggtaatggccgtgcacaattattctttaagcaacatggttggactgaaggtgggaagattgaatcaaa

SEQ ID NO: 1595 - DNA, 356 bp, Pinus radiata
ccttaacgttgtctatgtgttgatatatatcacaagtgccgtctatcgcctccttcggttcctggggttccgagagtttgtggaacccgagacctcctggccagatgaaatcaacccacggttgaagcccgtgacattttccgtatctgcgcagaggattcgtgagcgattaccagtagttcggttcggcgttttagcggaggaggccggtgatgaggatgttatgtgcgctgtttgcttaaataacatgcagaggcatgaggagatccgaaggctaacgaattgccgtcacatcttccacagagactgtatggacaaatgggttgatcatgaccagaacgcctgtcctctctgca

SEQ ID NO: 1596 - DNA, 378 bp, Pinus radiata
  misc_feature (1)...(378): n = A,T,C or G
gtcaacgagaattgccacgatgggttaatgtggatttaggtctgggaagctttaggataagttaatgtaccgaagtgtggttaattttagtaaagaggattgtgttttatcatgcggatccagtgcgatgcctgcgagcaggcagctgcttcagtgatatgttgtgcagacnaggctgctttgtgcagggagtgtgatataaaagtccacaaggccaacaagcttgccagcaaacacaagagattgcctcttgtcggaacttccccaaagctctctcgctgcgacatttgccaggatagggcagccatcgttttctgtctcgaagatcgtgctatgctgtgccaagactgcgatgagtccgttcattctcgcgacaca

SEQ ID NO: 1597 - DNA, 387 bp, Pinus radiata
tcgataatagcagggagagtccccggccgaacagacaacgaaataaagaactactggaacactaacttgagcaagaaacttgctgtcaggggaatcgatcccaagactcataaaaaaatcacgacggacggcacgaacagagtcaacggtgatcgtttcagccagaggaaaggtgagaaaatatatgattctccacagaaacctcgacagccggaaagaaatgttgcgagggccgcccaatcaacagggctcgtgattcctaatgttcacaatctaaaagcggatttaaaagcgcaatatattgcaagaatcagagaatttaaaagctctaatactatcagctcctcttctcgacttaatgcacagattgagccaaagtccagagag

SEQ ID NO: 1598 - DNA, 276 bp, Pinus radiata
ggtttgtcagatttggtgacgagaatgagaaaaaccgagccatgactgaaatgaatggtgtttattgctcttcaagacctatgcgaattaatgaagctacaccaaagaagtccttgggatttcaacaaccttattccatgaaaggtaactattacacacaggcatatggtggtgcagttgctagtcaggccttccagtcagacaatgatccaaataatacaactatatttgttggtgggttagatccaaatgcgacagatgaagatctgaggcagg

SEQ ID NO: 1599 - DNA, 374 bp, Pinus radiata
  misc_feature (1)...(374): n = A,T,C or G
cacatcttgagcgaataaaaaatctacgtgatggtggagctggtgctgaagacagcgacnaaaaggatgaagactttgttgcagaaaacgatgatgctggatctccaacagatgagtcagaagaagagggatcagatgcaagtgagagtgcagaggtcaagcaacctgcaaagaaagaagtaaagaaaaaaaaggcggtggctcccaaggcaaccgagaccaagaagaagaagaaggacgacgaggaagagggaggaaagaaaaagcagcggcgaaagaagaaggatccaaatgcgccaaagaaagccatgactggatttatgttcttttctcaagttgaaagagagaatctgaaaaagagtgacccaagaatg

SEQ ID NO: 1600 - DNA, 334 bp, Pinus radiata
gatctgtgttgctgtttgattccgcaagcttggggagatcaggatctgctctttgttgtaaatgtcgatattacccaaatcagattccattcatattagggaagtatgggccgataatctggaagaggagtttaatctgatcagggaaattgttgatgactaccctctgatagccatggacacagagttccctggcatagttgtgcgacccgtgggcaaattcaggaccgtccaagaatacaattatgaaaccctaaggtcaaatgtagacgtattgaaattaatacaattggggctgacgttttctgatgaaacggcaacctcccaaactgcg

SEQ ID NO: 1601 - DNA, 401 bp, Pinus radiata
  misc_feature (1)...(401): n = A,T,C or G
gttaggccagctcttagttcgagtccgggccgctgctcttaatcctgccgactttaagagacggaaaggcttattaagaaacgcggattccgattttccgactgtgccaggctgtgatatgtcaggagtggtggtggaaattggtgatggtgtctccaagttcaaggccggtgacgagatatacagcaacatccagaatttcgcagcagggaggccaaagcagtgcgggactctcgcccagtacacagtggtggaggaattcctggtagcgccgaagcccagtaatttatcatttgaggaagccgcgagcctgccgcttgcgcttcagactgcgcagcagggcttcgatacaaccaattttgaaaaggggcagagcgtgttcgttgtgggaggctcggncg

SEQ ID NO: 1602 - DNA, 462 bp, Pinus radiata
ggtttgtcagatttggtgacgagaatgagaaaaaccgagccatgactgaaatgaatggtgtttattgctcttcaagacctatgcgaattaatgaagctacaccaaagaagtccttgggatttcaacaaccttattccatgaaaggtaactattacacacaggcatatggtggtgcagttgctagtcaggccttccagtcagacaatgatccaaataatacaactatatttgttggtgggttagatccaaatgcgacagatgaagatctgaggcaggtttttgggccatatggagagattgtgtatgtgaaaataccagtgggcaaaggatgtggttttgtacaattcaccaacaggtcctctgccgaggaagctttgcaaagttacacggcactgttattggtcaacaatctattcgcctttcttggggtcgatctccagcaaacaagcagactgcaagctg

SEQ ID NO: 1603 - DNA, 358 bp, Pinus radiata
cagcgaagccgatttccaaagatggatagggagaaactcatgaagatggctggtgcagtccgcactggcggaaagggtacaatgcgaaggaaaaagaagacaattcataagactgccacggcagatgacaagagacttcaaagtaccttgaaaagaataggcgtgaataacatccctgctattgaagaagtcaatatttttaaggatgaccatgttattcattttgctaacccaaaggtccaggcttctattgctgccaacacatgggtggttagtgggtcatcgcaaacaaaaaaacttcaagatcttttccctggtatcatcaatcagcttggaccagagagttttgccaatctga

SEQ ID NO: 1604 - DNA, 358 bp, Pinus radiata
accaagctcatcacatggcgtccgagaaggaagctgctcttgctgccacaccaccagaagatgataaacctacaatatttgacaaaatactgcagaaggagattcccagtacagtggtttacgaggatgagaaggtacttgcattcagggatatcgcaccccaagcacctactcacatcattatcatccccaaagtaagggatggcttgactggcctatctaaggcagaagagaggcatgaggatattctaggtcacctgctatacactgcaaaagttattgcaaagcaggaaggtttatctgatggcttcagaattgtcattaacgatggtcctactggatgccaatctgtgtacca

SEQ ID NO: 1605 - DNA, 461 bp, Pinus radiata
gcggactttattgtaaaagagccaatggtgattggtcatgagtctgctggaataattgaggaggttggcagtgaagtgaaacatctggttcctggtgaccgcgtagctttggagcctggaatatcgtgttggcgttgtgaccaatgtaagcgaggctcctacaatttgtgtcccgagatgaagttttttgcaacacctcccgtgcatggttccttggccaatcagattgttcatcctgcagatttatgtttcaagttgccagataatgtaagtctcgaggaaggtgccatgtgtgaaccactcagtgttggggttcatgcttgtcgccgtgcttctgtaggtcctgagacaaatgtcttggtaatggggcaggtcctatcggccttgtcaccgtgctgtctgcacgtgcatttggagcttcacgaattattattgctgatgtagatgaagagcgtctgtca

SEQ ID NO: 1606 - DNA, 463 bp, Pinus radiata
gccactgtttgtatgtgatctccgggccttgagcttatacgtttttcagttgcaggtttggagcctgtcaaattatacttaccatgatttggaaagaagctgcgacagtgctacacaaggcccaacatctggagaagccacccttcatctttactgtatttatcgcatcttttataggattcgccgccttctcgtatctcatcactaaccgtagaactagggaattacgaggaatcccgcccggcacctttggatggcctttgatcggcgagacattagaatttctgggatgccagagaaggggaaggccccaggatttctgtgaccgtcgaacacagaagtatggaaacgtgttcaccacttcccttgtgggcacccgacagtggtattatgtagtccccaaggcaaccgcttcttgttcgccaacgagaacaaactggtggtaaattcatggcccgcctct

SEQ ID NO: 1607 - DNA, 410 bp, Pinus radiata
tcctgactttgctaatgagacattcggcccaagcttagtcgttgttatcgctgccctgttcctctcaatgctatgctttttgttgttcaatgccctgctccgctgcagacggctctacaggcgatggcgagtggtgtcggagccatcacccaatatggatgtcgaaagaactgaatctggcatcgagaaaaaggatttagaagcactttcagccacagtttaccgcaaagcccaccccctcagagccatggattgccccatttgcctggcggaattcaaagaaggagaaaaggtgagagtattaccagaatgctgtcactgtttccatgcagattgcatagacgcatggctgctttccaatgcttcttgtccttcatgtcgacacactgtcctttgcgcattgccgaaga

SEQ ID NO: 1608 - DNA, 357 bp, Pinus radiata
taataattgggtactgtggagattttcctgtgcattgaccattacaatggctgagacagtggttttgaaggttggcatgtcttgcgaaggttgtgttggagctgtaaaacgagttctcaataaaatggaaggtgtggaaacatatgatgtgaacttgaaggagcaaaaagtaactgtgaaagggaacgtgaagcctgatgccgttctgcaaactgtttcaaaaactggaaaggaaacatccttctggccagaagagaaggatgccaccacgtgatggtgcatattctcaggtttaatatagatatggacatatattgaacatgcttttttgaggcacttttaataatatttctaata

SEQ ID NO: 1609 - DNA, 222 bp, Pinus radiata
ccaagaacgcgggaaggaagaggatgaatttgtacagaggcatcagacagcgtccatggggaaaatgggctgcggagattcgagatcccagaaagggggttagggtttggcttggaacgtttaacacggccggaggaagctgccagggcctatgacgcagaggcttagaagattagaggaaagaaagctaagcttaactttaccgatgattcatgctcagta

SEQ ID NO: 1610 - DNA, 302 bp, Pinus radiata
  misc_feature (1)...(302): n = A,T,C or G
gttcagcctatggttgtctgctaaatcgcttccacaaatgtcgatccatctggagagacctcttataactgaaatacaagtgcgtatggactgtaatggctgcgttcagaagatacgcagagctctgcaaactcttcaaggcatttatgacgtttacatanatttcccccaacaaaaggtgacagtggtaggatgggttgatccagacctattaatgaaggccataaagaaagccgggaaaagagccaaactgtgcagccacgtacgcgatgaagaaacggtcgagagagccgacccggcgg

SEQ ID NO: 1611 - DNA, 268 bp, Pinus radiata
gaatgaagttagatacggcaaagaaaggccttcctccaggcaccatgggatggcctctctttggagaaactcctgattttctcagatatggtcaacaatttatcaaaaacagaaaggccagatatggagatttgttcaagactcacattctaggatgcccgacggtgatatcgacggatccagctctcaacagatatatcttattgaatgaaggccgaggactaattcctggatacccgcagtctatgcttgacacattgggaaaatg

SEQ ID NO: 1612 - DNA, 312 bp, Pinus radiata
gctcactggaataaacactcttcgcatccagcccttcaaacttcccctcttggcccccatgatgcgaaggtgcgcatgaaggctgtgggtatctgtggcagtgacgtccactatttgaggacattacggtgtgcggactttattgtaaaagagccaatggtgattggtcatgagtctgctggaataattgaggaggttggcagtgaagtgaaacatctggttcctggtgaccgcgtagctttggagcctggaatatcgtgttggcgttgtgaccaatgtaagcgaggctcctacaatttgtgtcccgagatg

SEQ ID NO: 1613 - DNA, 324 bp, Pinus radiata
gctggctacagcttatgccttccgattcgtgggtgaatggatgaaatggctatacttggatgtaacaaaacgtttgggagcaaaggatttctcaacattggctgaagcacatgcatgtactgctgggttaaagtcattgacaacatcagtgactgcggatggcattgaagattgtcgtaagctttgtggtggacatgggtacttgtgcagtagtgggcttccagagctgtttgctgtatatgttcctgcgtgcacatatgaaggagataacacagttctgcttctacaggtagcaagattcttgatgaagacagtccaacaact

SEQ ID NO: 1614 - DNA, 395 bp, Pinus radiata
  misc_feature (1)...(395): n = A,T,C or G
gttcccaggagaggagagcctcagctgtctcgatctggcgttaaggggttacngaagaagaatttcgaagatggttagatcttcttgctattcaaagcaaggtcataggcgtgggatttggacccctatggaggatatgattctctctgaatacattcgaattcatggcagtgatggatggaaaaatatcgctaaacgagcaggtcttaaacgatgtggaaagagttgcagattaccgttggttgaactatcttcgccccgacattaaacgtggtaacatttctcctgatgaggaggacctcattattaggttgcatggccttcttggcaatcgcaggacgactaccgggtcgaacagacaacgaaatcaagaattactggcacactcatatgag

SEQ ID NO: 1615 - DNA, 231 bp, Pinus radiata
  misc_feature (1)...(231): n = A,T,C or G
ttacattcaaccaagctcatcacatggcgtccganaaggaagctgctcttgctgccacaccaccagaagatgataaacctacaatatttgacnaaatactgcngaaagagattcccaatncagnggtttacaaggatgagaaggtacttncnttcagggatatngcnccccaagcacctactcacatcattatcatccccaaagtaagggatggcttgactggcctatcta

SEQ ID NO: 1616 - DNA, 396 bp, Pinus radiata
ccggtccgggcggtggagagcatcagccttggagttacagaccaggaaaatacaagatgggtagatctccttgctgctccaaagaggggctcaaccgcggggcctggaccaaaagggaggatatgattctctccgaatacgttcgaattcatggcgatggtggatggagaaatcttccggaaaaagcaggtcttaagagatgtggaaagagttgcagactacgctggtttaactatcttcgtcccgatattaaacgcggaaacatttgccccgccgaggaggagcttattattcggctgcatcgccttcttggcaatcggtggtcactgatagcaggacgactgcctggtcgaacagacaacgaaatcaagaactactggaacactcatcttgagc

SEQ ID NO: 1617 - DNA, 296 bp, Pinus radiata
  misc_feature (1)...(296): n = A,T,C or G
gtcggcgtcggcggcggctgcgaggaaacggcggcgtcagctgtgaaggaaacgcatttcanaggcgtgaggaagaggccgtgggggagattcgctgcggaaatcagagatccctggaagaagacgagactctggctcggcacttttgacacagccgaagaggccgcccgcgcctatgataatgccgccagaaatctacgcggccccaaggccaaaaccaatttcgctatccacgacgatagcgcccgccctgttcaacagtggcggcggacgcgccgtccctagtcagcgacaag

SEQ ID NO: 1618 - DNA, 381 bp, Pinus radiata
gagctttctctcaagaacattcttacagcaaatgagcagactacaactgcagaacccagaaataataatacagttgttttcctggaatctattactaatccatctgtcagagttgcggatttaccgtctatttccactgtatgtaaaaagtatggagcatttcttatagtagataatacatttgctacaccgataaggatcaagcccatcaagcagggtgctgacatggtcattcattcagtaacgaaatttcttggtggccatagtgatctggttgcaggagtagttgcaggctcttctcaccacatagagttagcctcaaagctggtaggtcgctgggggctgcttgctgctccattcgattcatggcttgccactcgc

SEQ ID NO: 1619 - DNA, 373 bp, Pinus radiata
cggtccatgtgacttcgacatccatgagtcctgcgcccaagctcctaacgccactctccattcctgtcatccccagcatcctctcgtgttgagggacaaaccagtttcaccacaacgcgtatgcgacgtctgtggaagggatgttttaggattcgtttatgactgccgtgaatgtgacgtggacgttcatccctcctgtgcacagctgccgcagacgctgcgccacgctctgcatccacaccacacccttcaactctcccatggacctgaagctcccgcccctcctgcacgctcctgtaacgtatgcggagaagcctgtagccctgggcactggagctatcgttgcgaattagccagtgcgccgtgtgatttc

SEQ ID NO: 1620 - DNA, 137 bp, Pinus radiata
cacgggttccagaccttttgcatcttcattattcttccgcctgtgaaaagatggggagatctccgtgctgtgagaaggctcatactaacaaaggggcctggactaaacaagaagatgaccgccttatcgctcacatt

SEQ ID NO: 1621 - DNA, 372 bp, Pinus radiata
gttcccaggagaggagagcctcagctgtctcgatctggcgttaaggggttacagaagaagaatttcgaagatggttagatcttcttgctattcaaagcaaggtcataggcgtgggatttggacccctatggaggatatgattctctctgaatacattcgaattcatggcagtgatggatggaaaaatatcgctaaacgagcaggtcttaaacgatgtggaaagagttgcagattacgttggttgaactatcttcgccccgacattaaacgtggtaacatttctcctgatgaggaggacctcattattaggttgcatggccttcttggcaatcgcaggacgactaccgggtcgaacagacaacgaaatcaaag

SEQ ID NO: 1622 - DNA, 464 bp, Pinus radiata
ctgaattgcatttcttagtcggcaaaaatattaaagagtcaagacaaagagggggttacgggagcaggctgcgggttcgatcccaagataaggaaaaaagaaagaaaatttcatgaattgggcctgtagattccagtcacgaaattaaaacctatcggtctcgtcttcgagctaaagttggggaaaaagctaagctctcagggaatgggttcccgcacaatgctgtcctctaatggtggccggacacctcagttccaaccactcgttcgtcagaattctttatacaatttaacgctggaggaggtccagaaccagctcggggacgccagcaagccacttagcagcatgaacatggacgagctcctgaagaacatttggacacaagagaaagccaggctatatccatggcgatcggcaatgggcccatgaacggtgttcctcccaactctgcccctgccagcggt

SEQ ID NO: 1623 - DNA, 436 bp, Pinus radiata
aagaaaaatgggctgaatagtctcagggagggttttaaattgaatgagtaggtttttctggggtgagattctttcatatttatgcgtaaaacgttgactccaatcggcgtgaaacaaaccaatagaaatcccaaattgatttctttcaatttcatctgatacacagagagaattcagtcagtggaagtcatgtctaacataacgtctgcctctggagaggccagcgtttcttctggcaatacagctgccatggctgatagtgagagcattcggcaacagccaccacaacaattctcaacaccaacgtctgcaaatggcgccggaaatataaacagtgctcagcaaaacccagagaagaagagaaagagaaatcttccaggaactccagacccagatgcagaagtgattgctctgtcgcctaggactctcatggcta

SEQ ID NO: 1624 - DNA, 337 bp, Pinus radiata
gccagagctgtggctgttcccagaagaggatatcatcagctgtccagtttgtcctaagagactacagaagaagaatatagaagatgggtagatccccttgccccccaaaagaagcgcttaaccgtggggcttggacaggcatggaggatacgattctcaccgagtacattcgagttcatggcagtggtggctggaaagatatctccaaaagagcaggtcttaagaggtgtgcaaagagttgcagattgcgttggctgaactatcttcgtcccgatattaaacgtggtaacatttctcccgaggaagaagagctcattattcggttgcatcgccttct

SEQ ID NO: 1625 - DNA, 421 bp, Pinus radiata
ctgaagtgccgtcgattgttcgggaggatagcgttttcgaagttcgttgttgagttatctcgcgagactgtagaattttagggttgttttccacaaaccgacttttcccgacttcaaatcttgatattgaagtgacatggccggcgagaaaagaaagattaatagaatagctaacgcttcggccaggcaggtcaccttcgcgaagaggcggagggggctgttcaaaaaagctcaggagctatcgattttatgcgaagccgatgtagccctcctcgttttttcttcaactggaaagctgtaccagtactccagctccagcatgaaaatgatattggaccagtatattttgtattctagatcaattcaaaaggatggaaagccaaatctggaggagagtcacgatatccaaaagataaaccac

SEQ ID NO: 1626 - DNA, 315 bp, Pinus radiata; identical to SEQ ID NO: 515

SEQ ID NO: 1627 - DNA, 373 bp, Pinus radiata
cacatccatacatgtggggtggacagccgttgatgccaccttatgggactccactaccatatcctgcaatgtatccacatggaggaatctatgcacatccttccatgcctccgggtgcacttccgtatggtcactatggaatgccatcacctggcaatgctgaagttacaacgactttagcacttccaaatgctgaagcagaagccaagtcctcggaaggcaaagagcggaatacaatgaagagatcaaaaggaagtttaggaagccttggaatgattactggcaaaggaggagaaggtggcaaggcaacatcgggatctgcaaatgaggccatgtcacaaagtggggacagtggcagtgacggttcaagcga

SEQ ID NO: 1628 - DNA, 512 bp, Pinus radiata
cggtaatagcatagagggattatacagaggtggattgttattgaaacccagtagtggaggtagagtcttgacaagttgggacaaaggagggaattccacggatgttatagatatggatatagggactgggagactaacaggttctgaaaggagacatgacaaacggaatcctacatttacagaccattatagacattcagacagtgatcgaatgaagatgaacagctacttatatccagaaaacaacaatagcacggcgcttgttgcgtctctgtttgttcccaggaacgacaaacttgtaaagattgatggcaaccttataatccatgcagttctagctggggaaaaagcctcgagagcattatctgcctcacagtctagaggcaacaaagatgggcatgtagacaccatttcacttcaaaaggaatatgaaaagaatagtttggcagtcagaacagaaaggcatcgtgctcttgctgctgctgccgccgccactacagattcagccagaa

SEQ ID NO: 1629 - DNA, 395 bp, Pinus radiata
gagaaaacggacctgaccatatcgaaacattcacagggggagattgatcaaacacaaataccgtaaaatcgcagcgaaaatccaaaattccaccatggggactgtggcggaggatggcagcaagggttacaaggccgtaaatccccatcccaaaaagggcgtcgcctcgtggctggtggacatggtggagaaactggtggttgaaacttctgcgttgtatagttcgaagaagcctctgcattttcttttggggaacttcgctccagtctcggaaactgcccccaaatcgcacctgcctgttgttgggcaacttcctagttgcttggatggagagttcgtgcgcgttggtcccaatccgaaattcgcaccggtagctggctatcactggtttgatg

SEQ ID NO: 1630 - DNA, 285 bp, Pinus radiata
ctctgcattttcttttggggaacttcgctccagtctcggaaactgcccccaaatcgcacctgcctgttgttgggcaacttcctagttgcttggatggagagttcgtgcgcgttggtcccaatccgaaattcgcaccggtagctggctatcactggtttgatggagatggaatgatccatggtctcagaattaaagatggtaaagccacatatgtgtcacgttatgtgaagacatcacgcttgaaacaagaggaatactttgggaaagcaaaattctttaagattg

SEQ ID NO: 1631 - DNA, 438 bp, Pinus radiata
gtttttcaaagctcaggtttaacagaaaatacccgggaaaattaacaagaaaaaaggaaaaacagagattttgtttatttctgttattagtctgctaaattggtttttgataatttaattaattaaggcgggggcccgcacctccaggcagtggcggagaccagtgggcggccctgccacccgaggaggagagccgcgtgcgctttctcgacttcgaacccgcggctatggaggcgctggatcaggtactctgcctgcgtctcggtgaagttgctgaaggccactggggagaagccggcggcggcgaacagggtcttccatggcggagccggcggcggaggaaatggtggcgtcgatcttcggagctagcaggaacttctcgatcttgtgcacggcctccatgttgatgttcacggcatccagtgaatcgaacaggaa

SEQ ID NO: 1632 - DNA, 457 bp, Pinus radiata
ccatatcgaaacattcacagggggagattgatcaaacacaaataccgtaaaatcgcagcgaaaatccaaaattccaccatggggactgtggcggaggatggcagcaagggttacaaggccgtaaatccccatcccaaaaagggcgtcgcctcgtggctggtggacatggtggagaaactggtggttgaaacttctgcgttgtatagttcgaagaagcctctgcattttcttttggggaacttcgctccagtctcggaaactgcccccaaatcgcacctgcctgttgttgggcaacttcctagttgcttggatggagagttcgtgcgcgttggtcccaatccgaaattcgcaccggtagctggctatcactggtttgatggagatggaatgatccatggtctcagaattaaagatggtaaagccacatatgtgtcacgttatgtgaagacatcacgct

SEQ ID NO: 1633 - DNA, 318 bp, Pinus radiata
aattgttgataatcagattccattgagtggacctgattcagttattggtagggcacttgttgtccatgagttagaggatgacctggggaaaggtgggcatgaacttagtctgacaactggcaatgctgggggcaggttggcttgtggtgtggttggactcactcccatttaaggcccagtcaaatatggaatgatcttcaaaggtcatggacatcgtatgaaaccagtgactgcaataataattccaaaatatatgttctttatcctcgcaagattgttagcaattgtgatttgtttttggtattaacgagttgcact

SEQ ID NO: 1634 - DNA, 211 bp, Pinus radiata
gccgtggctgttcccaggagaggagagcctcagctgtctcgatctggcgttaaggggttacagaagaagaatttcgaagatggttagatcttcttgctattcaaagcaaggtcataggcgtgggatttggacccctatggaggatatgattctctctgaatacattcgaattcatggcagtgatggatggaaaaatatcgcttaacgagca

SEQ ID NO: 1635 - DNA, 350 bp, Pinus radiata; identical to SEQ ID NO: 530

SEQ ID NO: 1636 - DNA, 356 bp, Pinus radiata
ggttgctggattccaacggaaaggatttgcctctttcatcagtctataatcgaggatctctgcagtcctttactagtgaaggtcattccgtttcaacagtaatcctccgtattgaaaaggaggaagaagagtttgtctttgttgacattcctgaaagaccaattccctctctactacgcaattatagtgctcctgtgcgtcttgtttcagatatcactgatgatgatttgtactttctacttgcacatgattcagatgagtttaaccggtgggaggctggccagacattggcaagaaaactcatgctctctctcgtagataaggcgcaacagaatcaaccattgagtgtggaccca

SEQ ID NO: 1637 - DNA, 362 bp, Pinus radiata
cgaggctccgttcaacccctttcatcttcaatcgttccaaggcctcttcggtctgcctgggtgcgtttctgaatttctcgccaagtgagtgagtcgatccagccttgtttcagcgaaacctgttgtggttttgggttttcttggcttttgccttttcattctttgtttccttggattcgaactcgagatctcctgaatattatggcacaggagagctggaaccaggaggagaccgggtgccaagtcccggaagggctcatgcgctgtgccaacaactgtggcttcttcggaagtccggccaccatgagtctctgctccaagtgttaccgcgaattcgtgctgctcaactcccctaaatcgtc

SEQ ID NO: 1638 - DNA, 359 bp, Pinus radiata
cgaaactcgaatcgatatgctttgtggccggttcaaatatttgagctggcttagcttctctggttcagaaatggcggactaaagtaatagtgtgccccgaggtctggtgttcgaatctcgttggcgtgaaaggtcaaatttttctctcgagtttcattgattctgaaaaactggcatagctatggcgatgagcaatgggagattgtgtgaagatttggataggattaaggggccgtggagccccgaggaggacgcgtcgctgcagaggcttgttcagaaatacgggccgaggaactggaccctgataagtaaaggaatcccggggcgatccgggaaatcgtgcaggctacggtggtgca

SEQ ID NO: 1639 - DNA, 299 bp, Pinus radiata; identical to SEQ ID NO: 525

SEQ ID NO: 1640 - DNA, 300 bp, Pinus radiata
gaaactatgaaccgcgcataaaatcgaaggcgaggagtgctagaagaggcggtgaagttgaagttgttatggggggaattatgctggtcgggtcgacgatgattcctgcgggcggcgcggcggcagcggcggagacgtcggtggaggaaggaggagaattgaataagatcgaaagccctacaccatcaccaagtccagagaaagctggactgagcaggagcacaacaaatttctgcgaagctatgcagcctgtttgatagggactggaagaagaattgaagcatttggttggttcacaag

SEQ ID NO: 1641 - DNA, 311 bp, Pinus radiata
gttcagctgttcgcaaagcacggagcgaaagtcataatcgcagacgttgcagagaaagctggcagaaagcttgcagaatccctttctccagcatcggcaacttatgtgcactgtgatgtcagcaaagaagaagacgtgagcgcggctgtggatctggctatggataagtatggtcaactcgacattatgtataacaacgctggaactaacgacagctttctggtgaagagcgtggcagagtatgatatggagcaattcgatcgagtgatgaacgtaaacctgaaaggagtgatgcacggcattaagcacgc

SEQ ID NO: 1642 - DNA, 350 bp, Pinus radiata
agggatcaggcaacgtccatgggggaaatgggctgcagagatcagggatcccagaaaaggcgctagggtttggctgggtacctttaatacggcggaggaagctgctcgggcttatgatgcagctgcacgaaagatcagaggtaagaaggcgaaagtaaattttgttgatgagccaccaccctccgttaagaaggaaagtaataatgctaagggttccaagaaagggtccagcaagaaaataaaatcatatctaccccaaagcctgactttttcgaaggtttcaaaacggcgaacccttcgattgcccaatacaacttccatcagaaattcccaaaccctaactgtgatga

SEQ ID NO: 1643 - DNA, 322 bp, Pinus radiata
gacttttgctccgaactgttctgctgaaacaaaatccagtattgagctaggtttagaatcgggtttgctggtcatctgggagaggcgatccattcagcttcgcaggcccccgaagatggcgttcgccggcacaacccagaagtgcaaggcatgtgaaaagacggtctatttggttgatcaattgacagctgataattctgtttttcacaaatcctgtttccgctgccatcactgcaatggaactttaaagcttagcaactattcgtcgtttgagggagttctatattgcaaacctcattttgaccagctgtttaagagaaca

SEQ ID NO: 1644 - DNA, 345 bp, Pinus radiata
gccgaaactcgaatcgatatgctttgtggccggttcaaatatttgagctggcttagcttctctggttcagaaatggcggactaaagtaatagtgtgccccgaggtctggtgttcgaatctcgttggcgtgaaaggtcaaatttttctctcgagtttcattgattctgaaaaactggcatagctatggcgatgagcaatgggagattgtgtgaagatttggataggattaaggggccgtggagccccgaggggacgcgtcgctgcagaggcttgttcagaaatacgggccgaggaactggaccctgataagtaaaggaatcccggggcgatccgggaaatcgtgca

SEQ ID NO: 1645 - DNA, 508 bp, Pinus radiata
cgtgtcaaagcccaaacgacccgtttcaacgcttataacatattatgtgagtatcggagtggaaaggcagcaccgagaaacatatccgaggagaaagtatactcatatattaacgtaacggaaaatggaaataatgatgatcaaggcaaaggtattacagaggtccatcctcatcccaagaaaggcatcctttcatcggtaattgatttggccgagaaaatcgtggttcgctcgctctacggctccgccaaacctctgcactacctcgctggtaatttcgcaccggtcgaacaagaaactccgccgcacacagacttgtccgtcattggaaatctccctaaatgcttggatggagaatttgtgcgagtcggtcccaatcccagattttgcccccgtcgctggctatcattggttcgacggagaccggaatgctcatggtttgaggattaaagatggcaaagcagcttatgtttcgcgtttccgtcaaaacttcacgtctcaagcaaga

SEQ ID NO: 1646 - DNA, 368 bp, Pinus radiata
tggctcttcccggcagacctagtaagccgactactgtaaatttattcttttagggttacagaaaaagaaaatacaagatgggcagatctccttgctgctcaaaagaagggctcaaccgtggggcctggaccaaaagggaggatatgattctctccgaatacattcgaattcatggcgattgcggatggagaaatatgcccaaaagagcaggtcttaaacggtgtggaaagagctgcacgattacgatggctgaactatcttcgccccgacattaaacgtggaaacatttcccctgatgaggaggaactcataattcggctccatcgccttcttggcaatcgatggtcgcttatagcattgaagattac

SEQ ID NO: 1647 - DNA, 367 bp, Pinus radiata
  misc_feature (1)...(367): n = A,T,C or G
cttcccttcatcagatgtttcccaggctgcactcatcagctgcagcaccacgcggttttggattctccctgttctttgttctgttgcgttaaagattggttgcaggtcgaatcgcccaggccgatttgaattctcctgaggattgacaagatgacgcgcaagtgctcgcactgtggcaacaacgggcataactccaggacgtgccctaaccgcggcggggtgaagctcttcggcgttcggcttaccgatggcccgatcagaaagagcgctagtatggggaatttgatgatgatgtccaaccctagctctcccgctgacccctccnagccggcctctgccgcttctgctgccgcggcggcggcggcca

SEQ ID NO: 1648 - DNA, 511 bp, Pinus radiata
gtggctcttcccggcagacctagtaagccgactactgtaaatttattcttttagggttacagaagaagaaaatacaagatgggcagatctccttgctgctcaaaagaagggctcaaccgtggggcctggaccaaaagggaggatatgattctctccgaatacattcgaattcatggcgatggcggatggagaaatatgcccaaaagagcaggtcttaaacggtgtggaaagagctgcagattacgatggctgaactatcttcgccccgacattaaacgtggaaacatttcccctgatgaggaggaactcataattcggctccatcgccttcttggcaatcgatggtcgcttatagcaggaagattaccaggtcgaacagacaacgaaatcaagaactactggaacactcatatgagcaagaagctgcttccattgaacgaatctcaacccaagactttgcctgtccccaagaggaggtcgcaatctccttctcccctgcaaaatcgagtct

SEQ ID NO: 1649 - DNA, 364 bp, Pinus radiata
tgcgcctccatccgaccaaacaagtgggggacatgcatattgcaagtgtggagaacactgcagctgcaatccatgtaactgttcaaagattgacgagactgttagtgggaaatccttctgtaaatgtggagagaattgcgcctgtgaaacatgcacctgcagcagagctggaatatagcctagttgattgtttttctcagccagaacttaggattccatgaccactagtaataagatgcagtatcaatagcagctgatgtttatgtatgcagtaagtttataaaagagagtggttactttttggctttagtaatttggtgcttatgttatgtatgtagtaagtttatctccaaatacagagccg

SEQ ID NO: 1650 - DNA, 354 bp, Pinus radiata
caagagtaaacccgaaggaatagaaggggaaggaggcatcggcagcgttgttcctcctcctctcctctcctgcatttctcaaactcaaatacctctcctctcacatcatggaaggcggagtcgtctttgaatctgtgcaaaacccactggatcgcctgaacactggaaatatggaccatggttgtgcccattacaggagacgatgtcggattcgggccccttgttgcaatgagatctatgattgtaggcactgtcacaatgaagccatgagccatctaaaggaccccttgctgcgccatgagctcccaagatacaaagttgaacgggttatttgttctctctgtgacactgagc

SEQ ID NO: 1651 - DNA, 424 bp, Pinus radiata; identical to SEQ ID NO: 512

SEQ ID NO: 1652 - DNA, 422 bp, Pinus radiata
gtcaatgctgcccgtcgaactggaggccctattgaaactatcaagaaatttaatgcaggatcaaacaaagcagcctcgagcagcaccaccttgaacaccaagaagcttgatgatgagacagaagttctcgctcatgaaagagtttcatcagatttgaagaaaaacataatgcaagcccgtttagataaaaagttgacacaagcccagcttgcacagcaaatcaatgaaaaacctcagattattcaagagtaccgagtccgggaaagcaattcccaatcagcagatcattgccaagctggaaagggtccttggtgtgaaactgcgtggaagcactggaagtggaaagaaataactggaagtatgcaatagcaataacatgtcatagagttgtgtgatttggcgttcaccacccacacctgctt

SEQ ID NO: 1653 - DNA, 357 bp, Pinus radiata
  misc_feature (1)...(357): n = A,T,C or G
gnacgagctcgatctggccttaaggggttacagaagaagaatttcgaagatgggtagatcttcttgctattcaaagcaaggtcatagccgtgggatttggacccctatggaggatatgattctctctgaatacattcgaattcatggcagtgatggatggaaaaatatcgctaaacgagcaggtcttaaacgacgtggaaagggttgcagattacgttggttgaactatcttcgccccgacattaaacgtggtaacatttctcctgatgaggaggacctcattattaggttgcatggccttcttggcaatcgatggtctttgatagcaggacgactaccgggtcgaacagacaacga

SEQ ID NO: 1654 - DNA, 306 bp, Pinus radiata
gcgcattgttcagctgtgtcgcagaacacggagcgaaagtcataatcgcagacgttgcagagaaagctggcagaaagcttgcagaatccctttctccagcatcggcaacttatgtgcactgtgatgtcagcaaagaagaagacgtgagcgcggctgtggatctggctatggataagtatggtcaactcgacattatgtataacaacgctggaactaacgacagctttctggtgaagagcgtggcagagtatgatatggagcaattcgatcgagtgatgaacgtaaacgtgaaaggagtgatgcacg

SEQ ID NO: 1655 - DNA, 368 bp, Pinus radiata
cttcagtttgccattgaagaccaataaataattattgtgaagcagcagcgttttaatcagagatccagcaagaagaggaccaggaaaaatcatttgcagaacaagaagataatccaagatgtcaagcacacgcagccctcagtgtgggtgcggagaaacttgcgcttgcgccgattgcaagtgtggagttgtgagtattgcgcctccatccgaccaaacaagtgggggacatgcatattgcaagtgtggagaacactgcagctgcaatccatgtaactgttcaaagattgacgagactgttagtgggaaatccttctgtaaatgtggagagaattgcgcctgtgaaacatgcacctgcagcagagctg

SEQ ID NO: 1656 - DNA, 333 bp, Pinus radiata
ttgaattcttgtcttccccccagctgaggctctctgagaccaaggtgagattcagccagtagtaagctatagattgatagttcagagaaaagactgaaaggcaaaaactatatagacataacaacggagagagcagcacaggaaccaggttgcataatggctaggcctcaaagatacagaggagtccgtcagaggcactggggatcatgggtctctgaaatccgccatcccttattgaagaccagaatatggctaggaacatttgaaacagcagaggatgcagcacgagcatatgatgaagctgcaaggatgatgtgtgggccgagagctaga

SEQ ID NO: 1657 - DNA, 355 bp, Pinus radiata
gttccccgtctcctccgtctgctaggcatttctctgcgattcttcttcttctgctcggggtctctctggtgaaatcgtccccgcaggaggagggctgagggcagggctcggctcggctcggttcgtttcggcaggagttatctcagggtttttctcttgattttctgcgccttcggactcgggcttacagttacagcatctggaaaatggcgtcacaggagagctcaaaaatgcaagaggaagggagtgggagacaagtgccggaagggcccattcactgtttgaacaactgcggcttcttcgggagcgcggccaccatgaacttgtgctccaagtgctacagagagcttaacgc

SEQ ID NO: 1658 - DNA, 341 bp, Pinus radiata
ggggaatgattcctggccgaggccattcgagcgccatacacattgcggcggactgcgggaagtattgttttcagtaattcccttaattgggtcccagaatacgttctcagatccgaaaacggttcagtccatcggaggttacagcgattcgaaggcctgaaaaccctaaaaatacctatccccctttgtctttgaatggcggagaactatggcagcccggatagcagcccccggtcggagaacgaatccggcggcggtcacatgggcggcagcgatttctctgtgaaagagcaggatcggttcctgcctatagccaacgtggggcgcataatgaagaaggc

SEQ ID NO: 1659 - DNA, 353 bp, Pinus radiata
gaaaaacaaagcagaaagccaccatgtggtagaggaggtgctgaggataaaggagcttcttgatgattcttatcagcctcaggaagtcttgctagagtcactgcagagtttgtttaacatgcatatttctgtggaggctttgaaggagactgatattggtagacaagtgaatggactgcgaaaacattcttctgctgacattcgaaagctagtaaaagagctcataaggaagtggaaagatcttgtcgatgagtgggtaagcactgcagatgaagttgcagctgctgcaattgttgatggagattctccacaaggtggtggcagcagaatttctcaacagagtattgtgcaga

SEQ ID NO: 1660 - DNA, 317 bp, Pinus radiata
caagagtaaacccgaaggaatagaaggggaaggaggcatcggcagcgttgttcctcctcctctcctctcctgcatttctcaaactcaaatacctctcctctcacaatcatggaaggcggagtcgtctttgaatctgtgcaaaacccactggatcgcctgaacactggaaatatggaccatggttgtgcccattacaggagacgatgtcggattcgggccccttgttgcaatgagatctatgattgtaggcactgtcacaatgaagccatgagccatctaaaggaccccttgctgcgccatgagctcccaagatacaa

SEQ ID NO: 1661 - DNA, 340 bp, Pinus radiata
caatggcggcccagactatcatcgctgcctctatggcatctcctctaacattatcaaatggccactatccgtttcagtccgagttcaaggggtccgtggttcgaatcccgcagagggcattttccttcgcgcctgcagcccgggcgctgaccgtcgtcgcagaggccaagaaggccgttgccgtgctcaaagggaattcacaggtcgagggtgttgtcagtctctcgcaggaagacagcggtcccacaacagtgaaggtccgtttgacaggactgactcctgggaagcatggctttcatctacatgagtttggtgacacaaccaatggctgcatatcaac

SEQ ID NO: 1662 - DNA, 563 bp, Pinus radiata
ttcggttcgtattcagggtttcgggagcttgttgtgtggtgttctgcaggtcaggacattgtaggcctggttatacaagatttcgaagcaaactctcggagcctcgaagaatcggcgcaaatttcaacggccttataactatttgggaagcagtactctggatttttctcccggaacggatcggagtgtgcgaagcgtaataatcgcctggaatttgtcttctgcaagataatattcaattaatctattgtcgaaggaaatttgagccgtataagaggataatcaaaagaagccggttgatttctccgggattaaaggatggatcaagaaaactggaacatcggagctgatggcactggctgccaactccagaagggcacactctttgcgccaataactgcggcttttttggcagttcggcaacgagaaacctgtgttcgaaatgttacagggatctgattatgaaggaggcccaagcctcatctgcaatggccgccgttgagaagtcatttgccgcgggttctccgatggaggaggaggcccctctttccaagccagatgtt

SEQ ID NO: 1663 - DNA, 572 bp, Pinus radiata
cagcaatggcggcccagactatcatcgctgcctctatggcatctcctctaacattatcaaatggccactatccgtttcagtccgagttcaaggggtccgtggttcgaatcccgcagagggcattttccttcgcgcctgcagcccgggcgctgacagtcgtcgcagaggccaagaaggccgttgccgtgctcaaaggaaattcacaggtcgagggtgttgtcaatctctcgcaggaagacaacggtcccacaacagtgaaggtccgtttgacaggactgactcctgggaagcatggctttcatctacatgagtttggtgacacaaccaatggctgcatctcaacaggagcacattttaatccaaaaaaattgacacatggtgctcctgaggacgatgtacgccatgcgggtgacctgggaaacatagttgcgggttctgatggagttgcagaggcaacaattgttgataatcagattccattgagtggacctgattcagttattgggagggcacttgttgtccatgagttaaaggatgacctggggaaaggtgggcatgaacttagcctgaca

SEQ ID NO: 1664 - DNA, 366 bp, Pinus radiata
atcgcttcggcccgagcaattttgcttctctgctaaacgatgggaagagcgccttgctgtgccaacggtgacagaagcaagggagcctggaccaaggaagaggatgacaggcttacccaatatattcaggctcatggagaaggatgctggcgttctctccccaaggccgcaggtctgcttcggtgtggaaaaagttgcaggctgagatggataaattatcttcgccctgatctgaaacgaggaggtttttctgaagatgaagacgatcttattctcaaactgcacgccctcctcggaaataagtggtctctgatagcgggtcgtttgcctggtcgaactggccaccaaaatcaaaactactggact

SEQ ID NO: 1665 - DNA, 348 bp, Pinus radiata
  misc_feature (1)...(348): n = A,T,C or G
gcatcttgctcgtgactgcaccaacaacccagtttgtaatttgtgcaatatatctggtcatgtggccagggagtgccccaaggctcgcattttggatggtantaggggtggaagatttattgacgataggcgtggaagatttaatgacataatctgtaggacatgcaacgagccagggcataccagtagggagtgcactggaattctcatctgccacaactgtggtggccgtggacatgttgcatactaatgcccctctggtcgtgtgatgctgcgggacatgcgcaggcattgatgctgcaatttctacaacaccttgactttttagattatctgattttgacaaat

SEQ ID NO: 1666 - DNA, 422 bp, Pinus radiata
agagagaagggtgttccctggactgaagaagagcacaggcagtttttgatgggccttcgcaagtacggcaaaggcgactggagaagtatttctagaaactttgttgtgtcaaggacaccaacccaagttgccagccatgctcaaaagtactacattcggcttggttcggataataaaaacaagagaagatccagcatacatgatatcaccactgttcatggtacagacaggatgccttctcctttactgcacgtttctaataggcagactaattccccctcaacacaggcagaaatgaatcattcaccatgtctgacatatccatctcagatttcacgaggacctctaataaactctttgggacctcaaatagatggtaaccttctattttcacctcactatcctctaaatctgtataccca

SEQ ID NO: 1667 - DNA, 467 bp, Pinus radiata
cttgttgtgtggtgttctgcaggtcaggacattgtaggcctggttatacaagatttcgaagcaaactctcggagcctcgaagaatcggcgcaaatttcaacggccttataactatttgggaagcagtactctggatttttctcccggaacggatcggagtgtgcgaagcgtaataatcgcctggaatttgtcttctgcaagataatattcaattaatctattgtcgaaggaaatttgagccgtataagaggataatcaaaagaagccggttgatttctccgggattaaaggatggatcaagaaaactggaacatcggagctgatggcactggctgccaagctccagaagggcacactctttgcgccaataactgcggcttttttggcagttcggcaacgagaaacctgtgttcgaaatgttacagggatctgattatgaaggaggcccaagcctcatctgcaatggc

SEQ ID NO: 1668 - DNA, 465 bp, Pinus radiata
tccagatgttcgtggtagacatgaaattttagagctttatttgcaaaataagcctctggctgaagatgtgaatgtgaaagcccttgctcgtggtacacctggtttcaatggtgcagatttggcaaaccttgtcaacattgcggccatcaaggcagcagttgatggcagtgagaagttgtctgccaaacatctggaatttgcgaaggatagaataatgatgggaacagaacggaagtcgatgttcctatcagaggagtcgaaaaagctcactgcataccatgagagtggacatgcagttgttgcatttaatactgtaggtgcaaaccctatacacaaggctacaatcactcctcgagggagtgctcttgggatggttacacagctgcctgacaaggatgaaacatctgttaataaaacgcaattattagcacgacttgatgtttgtatgggcggacgagttgcaga

SEQ ID NO: 1669 - DNA, 421 bp, Pinus radiata
cgaaccatggagtctaagggacaggctaatccatctgttgcttctgtttgtaatctcagcaagaatggagagcgacgattggaagggaaagttgttatagtaacgggcggggcagcgggcataggagaagccattgttcagctgttcgcaaagcacggagcgaaagtcataatcgcagacgttgcagagaaagctggcagaaagcttgcagaatccctttctccagcatcggcaacttatgtgcactgtgatgtcagcaaagaagaagacgtgagcgcggctgtggatctggctatggataagtatggtcaactcgacattatgtataacaacgctggaactaacgacagctttctggtgaagagcgtggcagagtatgatatggagcaattcgatcgagtgatgaacgtaaacgtgaaag

SEQ ID NO: 1670 - DNA, 445 bp, Pinus radiata
ccatatcgaaacattcacagggggagattgatcaaacacaaataccgtaaaatcgcagcgaaaatccaaaattccaccatggggactgtggcggaggatggcagcaagggttacaaggccgtaaatccccatcccaaaaagggcgtcgcctcgtggctggtggacatggtggagaaactggtggttgaaacttctgcgttgtatagttcgaagaagcctctgcattttcttttggggaacttcgctccagtctcggaaactgcccccaaatcgcacctgcctgttgttgggcaacttcctagttgcttggatggagagttcgtgcgcgttggtcccaatccgaaattcgcaccggtagctggctatcactggtttgatggagatggaatgatccatggtctcagaattaaagatggtaaagccacatatgtgtcacgttatgtga

SEQ ID NO: 1671 - DNA, 460 bp, Pinus radiata
cagacttttgctccgaactgttctgctgaaacaaaatccagtattgagctaggtttagaatcgggtttgctggtcatctgggagaggcgatccattcagcttcgcaggcccccgaagatggcgttcgccggcacaacccagaagtgcaaggcatgtgaaaagacggtctatttggttgatcaattgacagctgataattctgtttttcacaaatcctgtttccgctgccatcactgcaatggaactttaaagcttagcaactattcgtcgtttgagggagttctatattgcaaacctcattttgaccagctgtttaagagaacaggaagtttggataaaagttttgaagccattcctagagcatcaagaaatgacaagatgcatgagaatgagaacaggacacctagtagggtatcagcattgttttccggtacacaggataaatgtgttgcatgtggga

SEQ ID NO: 1672 - DNA, 301 bp, Pinus radiata
ttgttggtgggagacggagaacattgctttgttaaattggtcagcgggtttgcagctgaatccgaggctgttgcatccttaaaagtgttttacctttgtggtttggaccttagggtttgaactctttaaagaaactctcaaaatcagccttaaacaataacatacaagatgtccattctaccccaaagcgattccctcataataagggaagtttgggcagataatctggaggaggagtttgctttgattcgggaaattgtggacgattacccttatattgctatggatactgagtttcctg

SEQ ID NO: 1673 - DNA, 321 bp, Pinus radiata
aacacaaataccgtaaaattgcagcgaaaatccaaaattccaccatggggactgtggcggaagatggcagcaagggttacaaggccgtaaatccccatcccaaaaagggcgtcgcctcgtggctggtggacatggtggagaaactggtggttgaaacttctgcgttgtatagttcgaagaagcctctgcattttcttttggggaacttcgctccagtctcggaaactgcccccaaatcgcacctgcctgttgttgggcaacttcctagttgcttggatggagagttcgtgcgcgttggtcccaatccgaaattcgcaccgg

SEQ ID NO: 1674 - DNA, 380 bp, Pinus radiata
cctgttcgatatcactgctgaacctatcagttgtccattaccttcgcctgccttgcctgtattgtcatcacagtcggcctctgatcaagaagaagccgaatcaggtgataattctgcaaattctgcagatgtagaaactcttcttcctcaggttgatgaaacagcttctgctgatctgacagtgttcccaggttttgttaccccttatgtaccatacgggttccccatatggcacacttttagacccacaataactcaaacttccaatgtttataagccaacagctgtaatgccaactgctccaataaaaatggacgaatgcacagggttatcccagttaagcctcggcggtgttgcagcggcttctgcaatgaaaccct

SEQ ID NO: 1675 - DNA, 350 bp, Pinus radiata
cccagctgaggctctctgagaccaaggtgagattcagccagtagtaagctatagattgatagttcagagaaaagactgaaaggcaaaaactatatagacataacaacggagagagcagcacaggaaccaggttgcataatggctaggcctcaaagatacagaggagtccgtcagaggcactggggatcatgggtctctgaaatccgccatcccttattgaagaccagaatatggctaggaacatttgaaacagcagaggatgcagcacgagcatatgatgaagctgcaaggatgatgtgtgggccgagagctagaaccaacttcccattcaatcccatgcacctccatct

SEQ ID NO: 1676 - DNA, 262 bp, Pinus radiata
aagtgagcttcatatctaaccaataataacacctgtatagcttcacagcaacagggcaccatgggccgagctcttgctgtgataaaatgggagtaaaagaaaggcccctggactctaacgaagataaaatactggtcgactacattaccaaacatggccatggcaactggcgtgcactgcccaagcaagcagggctcctgcgatgtggaaagaagttgtcgcctgcgggggacgaattacctgaaacccgacatcaaaagag

SEQ ID NO: 1677 - DNA, 357 bp, Pinus radiata
cgacaatggcgcggacgggattcgaaaccgcgacgctcggcctcgaacgtaccgaggcgttcgccgccggagctgggggaagtgggtgtccgagattcgcgagcctgggaagagaaagcgcatatggttgggatccttccaaacggcagagatggcggctcgagcttacgacgtggctgcgctcagcctgaagggaagatctgctttgcccaatttcccggattccgtccacacgctgccgcgcccctcttctctgaatcccagagatatccagcttggcggctgcccaggcagccgcgaattaacgcagccgatggtctctaccgatatttcatcctgcaaccgcaagatcaaaat

SEQ ID NO: 1678 - DNA, 354 bp, Pinus radiata
  misc_feature (1)...(354): n = A,T,C or G
cacgaggcagtatctaccaatgtcggggagagacaggaagcttgttgtgcttggtattccttgggatgtcgacactgaaggtttacaggattatatgagcaagtttggagaactggatgatgtgattgttatgcgggatcgtgcaactggtcgttctcgtggatttggttatgccacattttcttcagttgaagatgctaagaaagcacttgacagtgaacatgttctaaatggtcgtacactggaagtaaaggtggctacacccaaggaggagatgaaggctccttctaagaagattacccggatatttgnggcaaagaattcccccttctgttacagaggatgcattccgaa

SEQ ID NO: 1679 - DNA, 174 bp, Pinus radiata
gtccgggcggtggagagcatcagccttggagttacagaccaggaaaatacaagatgggtagatctccttgctgctccaaagaggggctcaaccgcggggcctggaccaaaagggaggatatgattctctccgaatacgttcgaattcatggcgatggtgtatggaaaaatgttg

SEQ ID NO: 1680 - DNA, 221 bp, Pinus radiata
gttcattaagcatggagccaaagtcataatcgcagacgttgcggagaaagttggcaggaagcttgaggaatcactttctcccgctgtggcaacctacgtgcactgcgatgtgagcaaagaagaagatgtgagcgcggcggtggatgtggccatggataagtatggccaactggacattatgtataacaacgctggaactaatgacagatttttggtgaaga

SEQ ID NO: 1681 - DNA, 363 bp, Pinus radiata
gcttaggcgcattaaggagcaaaggaagggaaaatatcacagcgacacagcaaaacagagacagtcacaagaacaagcccgaaggaaaaagatgtcccgggcacaggatggtatactgaagtacatgctgaaaatgatggaagtttgcaaagcacaaggttttgtatatggtatcattcctgaaaaagggaagcctgtaagtggagcctcggacaatcttaaagcatggtggaaggagaaggtcagatttgataggaatggccctgctgcaatcaccaaatatcaagcagaacatgcaacacctggagcaaatgagagtaacatggttgtggctcctacccctcatactcttcaggaacttca

SEQ ID NO: 1682 - DNA, 374 bp, Pinus radiata
ctgatttgaagtgctcattcatgaacaatccgagcagcagttatgcataaaatgttgattgcagggctccgttattgcgagcaactaaagggcgatggtgttacaatcaaatatcgagaacgagaatgaatctgaagcctctcggaatgctacaaattggtaatttggctcctgttagaagagcattctcatcacctagagcctcagcagatgaagaagctgctgcaaaagcagctgctgctgtagcagagacaggagccccaaccatatttgacaagatcataaagaaggaaattccagcaactattgtttatgaggatgcaaaagtgttggcatttcgagatattaatccacaggcaccagtccatatattg

SEQ ID NO: 1683 - DNA, 407 bp, Pinus radiata
gccgtggctgttcccaggagaggagagcctcagctgtctcgatctggccttaaggggttacagaagaagaatttcgaagatgggtagatcttcttgctattcaaagcaaggtcatagccgtgggatttggacccctatggaggatatgattctctctgaatacattcgaattcatggcagtgatggatggaaaaatatcgctaaacgagcaggtaaaattctaatagcaatttttattgcaaacgtaatactcattgagaggttaactaagcgggcagtttttgttctgcaggtcttaaacgacgtggaaagggttgcagattacgttggttgaactatcttcgccccgacattaaacgtggtaacatttctcctgatgaggaggacctcattattaggttgcatgg

SEQ ID NO: 1684 - DNA, 361 bp, Pinus radiata
gttccagaccttttgcatcttcattattcttccgcctgtgaaaagatggggagatctccgtgctgtgagaaggctcatactaacaaaggggcctggactaaacaagaagatgaccgccttatcgctcacattcgagcccacggcgaagggggctggcgttctcttcccaaggccgcagggctgctgagatgcggcaagagctgcagactgcgatggataaactacctgcgtcccgatctgaagcgtggaagcttcacggaagaagaagacgaactcatcatcaaactccactccttcgttggcaacaagtggtctttaattgcagggagattgcccggacggacggacaacgagataaaga

SEQ ID NO: 1685 - DNA, 340 bp, Pinus radiata
caagagtaaacccgaaggaatagaaggggaaggaggcatcggcagcgttgttcctcctcctctcctctcctgcatttctcaaactcaaatacctctcctctcacaatcatggaaggcggagtcgtctttgaatctgtgcaaaacccactggatcgcctgaacactggaaatatggaccatggttgtgcccattacaggagacgatgtcggattcgggccccttgttgcaatgagatctatgattgtaggcactgtcacaatgaagccatgagccatctaaaggaccccttgctgcgccatgagctcccaaaatacaaagttgaacgggttatttggtctc

SEQ ID NO: 1686 - DNA, 332 bp, Pinus radiata
ggctcttcccggcagacctagtaagccgactactgtaaatttattcttttagggttacagaagaagaaaatacaagatgggcagatctccttgctgctcaaaagaagggctcaaccgtggggcctggaccaaaagggaggatatgattctctccgaatacattcgaattcatggcgatggcggatggagaaatatgcccaaaagagcaggtcttaaacggtgtggaaagagctgcagattacgatggctgaactatcttcgccccgacattaaacgtggaaacatttcccctgatgaggaggaactcataattcggctccatcgccttcttg

SEQ ID NO: 1687 - DNA, 347 bp, Pinus radiata
gattgatcaaacacaaataccgtaaaattgcagcgaaaatccaaaattccaccatggggactgtggcggaagatggcagcaagggttacaaggccgtaaatccccatcccaaaaagggcgtcgcctcgtggctggtggacatggtggagaaactggtggttgaaacttctgcgttgtatagttcgaagaagcctctgcattttcttttggggaacttcgctccagtctcggaaactgcccccaaatcgcacctgcctgttgttgggcaacttcctagttgcttggatggagagttcgtgcgccgttggtcccaatccgaaattcgcaccggtagctggctatcactg

SEQ ID NO: 1688 - DNA, 354 bp, Pinus radiata
cgataggcgtggaagatttaatgacataatctgtaggacatgcaacgagccagggcataccagtagggagtgcactggaattctcatctgccacaactgtggtggccgtggacatgttgcatacgaatgcccctctggtcgtgtgatgctgcgggacatgcgcaggcattgatgctgcagtttctacaccaccttgactttttagattatctgattttgacaaatctattttgaatttggaagttctttttctgagtagttagatcagtagacctgtcgtatcagttattatacagttttcttatactagtcctttacttcaagactggctgatatacttctattttcatatga

SEQ ID NO: 1689 - DNA, 348 bp, Pinus radiata
ggagattcctctctgcaaaatgcgctggaccttgctcatggttatctgagccagattccatcatatggtcatcgggaagttctagtcttgtattcagcactaagcacttgtgatccaggggatatcatggaaagtataaagaaatgcaagaattcgaaaatgcgatgctcagtggttggattatctgcagaaatttatatttgcaaacacctctgtgaggagacgggaggattctattccgtggcacttgatgagtcacatttcaaggaccttctgcttgaacattgccctccaccaccagccatagcagagtttgcagttgctagcttggtcaagatgggatttcct

SEQ ID NO: 1690 - DNA, 349 bp, Pinus radiata
tgcataccatcattgtaatggaggtgaaaggaataggagtgggattcttattaagcaatggaaggttacgctgcgaataacgatgcagaacttctgagcaaaacccttcaagtggaacagaagttgttctatttcgatctcaaggaaaacccccgaggtcaataccttaaaatctctgagaagacctccggctcacggtctacaataattgtgcccattggtggagttgcatggttcctcgatctctttaattattatgtcgacggagatgacgaggaagttttgagcaaggaattgcagctggatgccaaggtattttatttcgatgttggggtgaataaaaggggtc

SEQ ID NO: 1691 - DNA, 339 bp, Pinus radiata
ctgaagtgccgtcgattgttcgggaggatagcgttttcgaagttcgttgttgagttatctcgcgagactgtagaattttagggttgttttccacaaaccgacttttcccgacttcaaatcttgatattgaagtgacatggccggcgagaaaagaaagattaatagaatagctaacgcttcggccaggcaggtcaccttcgcgaagaggcggagggggctgttcaaaaaagctcaggagctatcgattttatgcgaagccgatgtagccctcctcgttttttcttcaactggaaagctgtaccagtactccagctccagcatgaaaatgatattggacca

SEQ ID NO: 1692 - DNA, 380 bp, Pinus radiata
gaaaccatgagggtcttgccacaaggtttgttgagccacaacctgaatggtcagtatttcgtgaggcgagctttggacatggggaacttagagttgccaatgcaacacatgcacattggagctggcatcgtaatgatgatgatgagccagttaaatctgatgaagtttggatcaataatcttagccaatcaagagaatgtatagaaagtaccgactacagtggaaggaaaatactaattgcaccttgagtatatgcttggagggagaagtgatctaactgtaattgccaaggcaaaacactgagtgtgagctcatgcacggcaatgaatttatggttcagtgtttagttgtatggaagtatattattcattagacatgca

SEQ ID NO: 1693 - DNA, 442 bp, Pinus radiata
ggatatcatcagctgtccagtttgtcctaagagactacagaagaagaatatagaagatgggtagatccccttgccccccaaaagaagcgcttaaccgtggggcttggacaggcatggaggatacgattctcaccgagtacattcgagttcatggcagtggtggctggaaagatatctccaaaagagcaggtcttaagaggtgtgcaaagagttgcagattgcgttggctgaactatcttcgtcccgatattaaacgtggtaacatttctcccgaggaagaagagctcattattcggttgcatcgccttcttggaaatcggtggtctctgatagcaggacgactgcctggtcgaacagacaacgaaatcaagaattactggaacactcatatgagcaagaagccatggctgtcaatggacgaatctcagtccaatacttcgca

SEQ ID NO: 1694 - DNA, 351 bp, Pinus radiata
tttttttttttttttccttactcccacctttttgttcgtctgcgcatggttttgtatctgatgtcaaaattgtctgcaacgcatgctgatgttgattcccatgcccgactacaacatctgcacaaataggaagttaagaataaagcgaacaataaaagtgccagccattagcagtaaattggcagatatccctcccgatgattattcgtggaggaagtatggacaaaagccaatcaagggctccccacatccaaggggctattataagtgcagcagcatgagaggttgtcctgcccggaaacatgtggagcggtgtccagatgaaccttccatgcttattgtgacttatga

SEQ ID NO: 1695 - DNA, 304 bp, Pinus radiata
caaggccgtaaatccccatcccaaaaagggcgtcccctcgtggctggtggacatggtggagaaactggtggttgaaacttctgcgttgtatagttccaagaagcctctgcattttcttttggggaacttcgctccagtctcggaaactgcccccaaatcgcacctgcctgttgttgggcaacttcctagttgcttggatggagagttcgtgcgcgttggtcccaatccgaaattcgcaccggtagctggctatcactggtttgatggagatggaatgatccatggtctcagaattaaagatggt

SEQ ID NO: 1696 - DNA, 371 bp, Pinus radiata
gcgtggatgtacaacgaatatggatccatagaggtcctgcactttggggatttccctgttccaaagcctgggttaggccagctcttaattcgagtccgggccgctgctcttaatcctgccgactttaagagacggaaaggcttattaagaaacgcggattccgattttccgactgtgccaggctgtgatatgtcaggagtggtggtggaaattggtgatggtgtctccaagttcaaggccggtgacgagatatacagcaacatccagaatttcgcagcagggaggccaaagcagtgcgggactctcgcccagtacacagtggtggaggaattcctggtagcgccgaagcccagtaatttatcatttgagga

SEQ ID NO: 1697 - DNA, 523 bp, Pinus radiata
ccttcatggatatgttggagttgattcgccaccatttgctggaagtggaggacaatatagatatagatattgatattgagggaacttcgccgttgttcttcacccccactgccattgagagtggcgattatattaatattgatgatcatgacgatgatacccgagcaaatgccagagcgaccagggcctcatgccaaaatatcgtcagcagaacaacattaaaagagaacgcgaatgaatttacacaacagatccattcttcatcttctccaagatgctcagttatgaaaggagcagaggcgtttcaggtaaagcaacaaccacgggagcgggagaatggaaagaagagagagacaagtgccaggaattacagaggagtgaggcggcggccgtggggaaaattcacagcagaaatcagagattccgccgcgaagggtgctcgggtttggcttggaactttcaacaccgtcgaagaggctgctcatgcatatgaccgcgctgcctacagattccgtggagctcg

SEQ ID NO: 1698 - DNA, 471 bp, Pinus radiata
cgcgatagccgagagcacccttatctcctccactctgtttcatacatgcaacaagctctggcagcagcaatggcggcccagactatcatcgctgcctctatggcatctcctctaacattatcaaatggccactatccgtttcagtccgagttcaaggggtccgtggttcgaatcccgcagagggcattttccttcgcgcctgcagcccgggcgctgaccgtcgtcgcagaggccaagaaggccgttgccgtgctcaaagggaattcacaggtcgagggtgttgtcagtctctcgcaggaagacagcggtcccacaacagtgaaggtccgtttgacaggactgactcctgggaagcatggctttcatctacatgagtttggtgacacaaccaatggctgcatatcaacaggagcacattttaatccaaaaaaattgacacatggtgctcctgaggatgatgtacgccatgcg

SEQ ID NO: 1699 - DNA, 483 bp, Pinus radiata
cttcctggtgttgttgctgtgatttctctgccattctgtgttgggtttatggttttagcttcactacaagcctttagcaagcctcacaaataagctttgcagtaggatgtctcctcccccgtcatattccatgtttcccaattcaggaatgggcttaaatccctcagtgacatcttcagaaccctctagtcaggtctccggatcgatcccccatcaatattcaggctccgaggaagaccctaaactgacgatcgatgaaagaaagcagaagagaatgctttctaacagagaatctgcaaggaggtccaggatgagaaagcaacagcatttggatgaattgagagccgaagcagctcatctcagagcagagaacagtcatatgctaacaaaattcaacattgcttcacagaaatacatgcagctggaagaagagaattctcttctgaggtcctatgccatggatttaagcctcaagctgcagtc

SEQ ID NO: 1700 - DNA, 442 bp, Pinus radiata
ttttttttgaatagaaaaaatataattaggtacttttccttagaatgttgcagataattgcatttactttcctaagaagccattgtctaactttagaccatgatatgcagttactgcaaagatcttgacaaacctaaccaatcacttatacctactgtcaagtaaatatgtaacaaatatcaattttcaatcaaaggtgccattaagagttttaaccaacaaggtgaaggcaatgaatctctagatctcactaacctaattctgctctacctaccaagctagcagtctggcttgaaattagcagaacttccaatggttattacaatttacacatgtcacaaatgtagtcataggttcatctgcacttcttgtttgcaactgatagtaagtacacttccgctggccacatttaccacacttgaattggtctgttgtagcttta

SEQ ID NO: 1701 - DNA, 316 bp, Pinus radiata
ctaaattcatatgctggacatacgtgatgtcatggcaggtgttcttgctgtaaagaggaaaagtttggccaaagatatctatttcctacagaatgcagaaggttcaggtctggctccatttgactgttggctatgcttgcgagggatcaaaacaatggctttgcgcattgagaaacaacaggagaatgcaaggaaaattgcagaatttttgtcatctcatcctctgattgagaaagtatattatgctggccttcctagccacccaggccacaatttacattttttgcaggcaaaaggaggaggttcagttcttagc

SEQ ID NO: 1702 - DNA, 329 bp, Pinus radiata
ataatgtcatattttatatccagagacttgaactatttgtatgttgtaattcatattggttgacatgattgatatgtacatatgttacatggtattagcatgaggatgttgatgtttgaccttatttaagtgttcgtaggttgtaaaaaaaaaaaaaaaaaactcgagactagttctcctcgtgccgaattcggcacgagggaacagctgaggaagagcaagaagaggtgttttgcgtgtaacaggcgggtggggctgacgggctttaagtgccgctgtggtgaccttttctgcgctcagcacaggtactctgatatgcatgactgctc

SEQ ID NO: 1703 - DNA, 325 bp, Pinus radiata
  misc_feature (1)...(325): n = A,T,C or G
ctcgtgccctggtgcaaagattgttataagaggcaagggttctgtcaaggaaggtagattacagcaaaaacgtgatctgaaacctgatccatccgagaacgaggacttgcatgttttggttgaggcggagacacaggatgctttggaaaaagctgccggcatggtggagaanctgcttatgcctgttgacgagggtttgaatgagcacaagcgggcgcagttgagagagcttgcggcacttaatgggacaatacgggatgatgaattctgcaggctttgtggtgaaccaagtcataggcaatatgcttgccctacaaggcttata

SEQ ID NO: 1704 - DNA, 453 bp, Pinus radiata
cttagcgtctatagaagagcagggactaattccatctttctccatttctatttctcttcccaatcaaaaccatggcgtctaacggacagcttaatgcaggcactggctgtgttggtgatctgaccaatgttggagatcgacgattggaggggaaggttgcaatagtaacgggcggggcagcgggcataggagaagccattgttcagttgttcattaagcatggagccaaagtcataatcgccgacgttgcggagaaagctggcagaaagcttgagcaatccctttcacccgctgtggcaacttacgtgcactgcgatgtgagcaaagaagaggatgtaagcgcagcagtggatgtggccatcgacaagtatggtcaactggacattatgtataacaacgctggaactaacgacagcgttttggtgaagagcgtagcagagtatgatatggagt

SEQ ID NO: 1705 - DNA, 242 bp, Pinus radiata
gaaaaggtcaattatcctgtgttgctacggaaatctaaatattcaaggttatggtatatgccagataagattttctttactccaaaagctgtcatcaaactggattttcactgtcctgaatcaaactgttcaccagaagcagtacttctaacttgtatttttactgcattattggtggattatttaaatgaatacggtgactataagtggatacagtcataagatgagaattttactggaga

SEQ ID NO: 1706 - DNA, 358 bp, Pinus radiata
gttttgggtttctgtttttaaccttggaaggttcaattttacagtttctacgggaattctcatattcaatctgtttggcagattgaactaaagatttttgtccgggtgatttttggattaaattcaaggtcgacgaacgtgaggtgctagggcttttagagtttggatggaacccatggacatcgttggcaagtccaaggatgacgtctcgcttcccaaagcaaccatgtttaaaattataaaagagatgctgcctccagatgttcgtgttgcaagagatgctcaggacttactggtcgagtgttgtgtggagtttatcaatctaatatcttcagaatccaatgaagtttgtggcaga

SEQ ID NO: 1707 - DNA, 334 bp, Pinus radiata
cgtttgcttgccgtgaaagaaatcgaacttccggcgcttgggtgcgagaaatatttgcaaatcgaacttccggcttgggtgcaagaagcttttgcgttttcggtttcagattaaagcaatatggagtcagaggaagacaaaatatctccagagaacaagaaaaggagattaaaaaccccacagcaggtcgaaggtctagagagcttttatgctgaacataagtatccttcggaagctatgaaatcacagttatcagaagaactgggattaacagagaagcaggtacaaggatggttctgtcacaggaggcttaaggataaaaggctcatgaagg

SEQ ID NO: 1708 - DNA, 288 bp, Pinus radiata
gcatcggcagcgttgttcctcctcctctcctctcctgcatttctcaaactcaaatacctctcctctcacaatcatggaaggcggagtcgtctttgaatctgtgcaaaacccactggatcgcctgaacactggaaatatggaccatggttgtgcccattacaggagacgatgtcggattcgggccccttgttgcaatgagatctatgattgtaggcactgtcacaatgaagccatgagccatctaaaggaccccttgctgcgccatgagctcccaagatcaaaagttga

SEQ ID NO: 1709 - DNA, 406 bp, Pinus radiata
gttccccgtctcctccgtctgctaggcatttctctgcgattcttcttcttctgctcggggtctctctggtgaaatcgtccccgcaggaggagggctgagggcagggctcggctcggctcggttcgtttcggcaggagttatctcagggtttttctcttgcttttctgcgccttcggactcgggcttacagttacagcatctggaaaatggcgtcacaggagagctcaaaaatgcaagaggaagggagtgggagacaagtgccggaagggcccattcactgtttgaacaactgcggcttcttcgggagcgcggccaccatgaacttgtgctccaagtgctacagagagcttaacgccaaaccaccttctttttcttctcacttgaaacctcagcaacctacgcttga

SEQ ID NO: 1710 - DNA, 434 bp, Pinus radiata
ccctcttcatcatcggcaaactcattatctcattcatcatttggtggaacctggccacaacctagtgtaccaacattgcatcttcccggtggcagtcttcaagttggtcttcaagctagtcgcctccgagcatcacttaatgccagagatgtacctcttgaggaattgaccttagattcggattgtgaagggcaacttataaatgattttgcttctctttcaggatctggaaacaccttgatgaggtctggaaaatacaagagtcatggctgtagtattgctccagttaatcttgaggatctatttgcttctgagatgtctcctaggggaccgtgccttgaaccttccgtgttttctcaaataagttctcaaattcagtcacataaggcagctcaagttcagcctcaggtgcaaacatcaattagtaatcagat

SEQ ID NO: 1711 - DNA, 387 bp, Pinus radiata
tttacttacacaccacctggaaatgaagatcgtcacttgctattcgttgatgagttacgtggtcgcttagtgactcttctagggggacgtgctgcagaggaagtggtatactcaggtcgtgtttccactggtgcacttgatgatataaagcgtgcaacagatatggcatacaaagctgtcgctgaatatggtcttaacaagtccataggtccaatttcattggcgactttgtctggtggcggtcttgatgagtctggaggagcaatgccatgggccaaggatcagggacatatggtagaccttgttcaaagagaggtgaaaattttgctacaatcggctttgacaatggcactccttgtcatacgctctaatcccactgtacttgag

SEQ ID NO: 1712 - DNA, 440 bp, Pinus radiata
ctccttagcgtctatagaagagcaaggactaattccatctttctccatttctatttctcttcccaatcaaaaccatggcgtctaacggacagcttaatgcaggcactggctgtgttggtgatctgaccaatgttggagatcgacgattgcaggggaaggttgcaatagtaaccggcggggcagcgggcataggagaagccattgttcagttgttcattaagcatggagccaaagtcataatcgccgacgttgcggagaaagctggcagaaagcttgagcaatccctttcacccgctgtggcaacttacgtgcactgcgatgtgagcaaagaagaagatgtaagcgcagcagtggatgtggccatcgaaaagtatggtcaactggacattatgtataacaacgctggaactaacgacagctttttggtgaagagcgtagaa

SEQ ID NO: 1713 - DNA, 446 bp, Pinus radiata
  misc_feature (1)...(446): n = A,T,C or G
ggctcttcccggcagacctagtaagccgactactgtaaatttattcttttagggttacagaagaagaaaatacaagatgggcagatctccttgctgctcaaaagaagggctcaaccgtggggcctggaccaaaagggaggatatgattctctccgaatacattcgaattcatggcgatggcggatggagaaatatgcccaaaagagcaggtcttaaacggtgtggaaagagctgcagattacgatggctgaactatcttcgccccgacattaaacgtggaaacatttcccctgatgaggaggaactcataattcggctccntcgccttcttggcaatcgatggtcgcttatagcaggaagattaccaggtcgaacagacaacgaaatcaagaactactggaacactcatatgagcaagaagctgcttccattgaacgaatctcaac

SEQ ID NO: 1714 - DNA, 519 bp, Pinus radiata
attcatttccgtgtaagttgcaacgcctcattgtttcctcaacctagtgagtaacattcgtgaattcgttatgcaagtagcttgcggaagggcacttctatcatgttattcttattccgagctactgtcagctatatgatggacctgtgttttcatcactggctcacttcacctgtttgagtatctgccatttttggatgtttgtgtaagcttggctaaataccagagacacaaagaaaccgtcctgtagccggagttatcgaaactatttacaatgccacgggtgaaatttatttccaggaacttcatggacatggtggcagcattaccggctgcaaagttagatcggctttatgatagtcatttcatttgcgaagcggttctgaggtctctgactcctgtgccaaagaaatatgtattgcaactattatatattgacgttgcggtgcctgccaaatcactggaggaatgggttctttcagatggcctgtctaagcacaaagcagcaattgataggtt

SEQ ID NO: 1715 - DNA, 162 bp, Pinus radiata
cggcccgagcaattttgcttctctgctaaacgatgggaagagcgccttgctgtgccaacggtgacagaagcaagggagcctggaccaaggaagaggatgacaggcttacccaatatattcaggctcatggagaaggatgctggcgttctctccccaagggcc

SEQ ID NO: 1716 - DNA, 481 bp, Pinus radiata
gttacagtagtgcgtacaaaattccagtgacattgacttgcaatctacttttatggagtaggtagggctccgtgaaattgcgcatgtcatgaatgtgctcgtctgtaagtggctgctttacgccggcgaaggttcggaccctgtggtggtggtgaattgactgtaagaggccgccgatctcgatcgaaggtgtacagagatcattaatggcgatgccgatgccgttgcttgtgaattgctctggctgtcagacgccactgcagctaccgccgggggcgaagtcgatacgctgtgctctgtgtcaagcggtcactcatgtagcggaacatcacggcgatattccgcctcgaggttaccgccaccagcagccattggctcctcccgcggtcagtccccagcactattcgcccgctccgccttcttcccacggcaggaagaaggcggtcgtctgcggcatttcttacagatattcccagcacga

SEQ ID NO: 1717 - DNA, 546 bp, Pinus radiata
agaagtgccaactgcaaactttgatttacaccatgctcactgtatacgaaacttgcagcgctgcactgtttgcggggatatgattccaaaaagtcgttctatggaacaccaccaggatacccatgctcctgtatcttgttcacagtgtggcgaatccattgaacgtgaattactagtcatccatgagcgtgacaagtgtcttcatagaattgttacatgtggttattgcgagtttccactgccagctgttgatcttgataaacatctgaacatctgtgggaatagaacagagtattgtaatccgtgcagcaagtatgtgagattgtgtgaaaagctagctcatgatttacagttccatgaaggaaattctgatgacactggggattcttcaagagagcagcacggggaaaataatcacagctcaccagcagcagaactgtctcggagagttcctagggaacggccacgagatacctcgcagcgtcgttggcttgtcacattagcaatcacaggaattgccataattataggatcatttgttcttca

SEQ ID NO: 1718 - DNA, 631 bp, Pinus radiata
tataaccgcctcttcttatactagtgcctttatcggttccattcaaacttgctcacggattccgacccttccggctaaagctgctgcatttctgtgtgtattgaagatggggagatctccctgctgtgaaaaagctcatacaaacaaaggggcgtggaccaaagaagaggacgatcgcctcatcgcccacattcgaactcacggcgaaggttgctggcgctcgcttcccaaggccgcagggctgatgcgctgcgggaagagctgcaggctccgatggataaactacctgcgtcctgatctgaagcgtggaaacttctcagaagaagaagacgaactcgtcatcaaactccactccctactcggcaacaagtggtctcttattgcaggcagattgcccgggcggacggacaacgagataaagaactactggaatactcacatcaagagaaaattgctaaacaggggactcgacccccagtcccatcgccccctcggccagccgcacaacagcaacacgacctgcccctctctgcccgccctcgagcacgaaattcttgtgttccagaggccaagaacgccggagatagcagatttctttcaatacgagcgctctgaaagctcgccgatggaa

SEQ ID NO: 1719 - DNA, 561 bp, Pinus radiata
gaacgaacggtgaagatacacagaggatctctcaacggcttcatctccgtcgtcgtctctcctccttccatctccagcgtccgatctgatcttatcaaaggaagcccttaaatccctccagctttccaagcgcgggttctgttgctgtatcccaggtccctggtcatatggcggaagctggcagcccgggcagccaggaaagtcctcgttccggggaacaaagcccccagtccagcgtgcgggagcaggacaggttcctacccatcgccaacattagccgcatcatgaagaaggcgctgccggccaacggcaagatcgctaaagacgccaaggagaccgtgcaggagtgtgtctcggaatttatcagcttcatcaccagcgaggccagtgacaaatgccagcgagaaaagaggaagacaatcaacggcgatgacttgctctgggccatgagcacgctagggtttgaagattatatcgagcccttgaaggtttacttgctcatgtacagagaggcggagggtgacaataagggatcttcaaaatctggagtagaccaatatg

SEQ ID NO: 1720 - DNA, 497 bp, Pinus radiata
ttattttgcagcatcgagaggcagcagctacggactaatcgatccatcatagccatttttaatttcgctgcccaatcgaaccatggagtctaagggacaggctaatccatctgttgcttctgtttgtaatctcagcaagaatggagagcgacgattggaagggaaagttgttatagtaacgggcggggcagcgggcataggagaagccattgttcagctgttcgcaaagcacggagcgaaagtcataatcgcagacgttgcagagaaagctggcagaaagcttgcagaatccctttctccagcatcggcaacttatgtgcactgtgatgtcagcaaagaagaagacgtgagcgcggctgtggatctggctatggataagtatggtcaactcgacattatgtataacaacgctggaactaacgacagctttctggtgaagagcgtggcagagtatgatatggagcaattcgatcgagtgatgaacgtaaacgtgaaag

SEQ ID NO: 1721 - DNA, 394 bp, Pinus radiata
aataaattgggttgcaaagctttccagttgtttgccagcattgaggtggctgagacttgaagaaagtgtacaacaatttgctgtctttatgttgtctcaagtcgatctttccagagaagctgcacacttgaaccgctttctttacaattttcgcaggtggaaagatgtgtcatttcctaagcccttgtacccacttgtacacccggcagttttggtggagacttatgaacaaggcgagagtgtggcacgctatgttgatcagccagaagcaaaccatagttttaatagatcacttgctcacactggcacgcatactctcctcaagatgctactggtggataatttcatccatgcagatatgcatcctggaaatattttggttcgaatgggacaa

SEQ ID NO: 1722 - DNA, 394 bp, Pinus radiata
taaggctaagcagaccagaggaggtgaaggagaaaaaagaaacaatggctggaataggaccgattagtcaggattgggaacccgttgtcatcaggaagaaggctcctaacgctgcagccaagaaggacgagaaggctgtcaatgctgcccgtcgaactggaggccctattgaaactatcaagaaatttaatgcaggatcaaacaaagcagcctcgagcagcaccaccttgaacaccaagaagcttgatgatgagacagaagttctcgctcatgaaagagtttcatcagatttgaagaaaaacataatgcaagcccgtttagataaaaagttgacacaagcccagcttgcacagcaaatcaatgaaaaacctcagattattcaagagtacgagtc

SEQ ID NO: 1723 - DNA, 317 bp, Pinus radiata
gattcttcttcttctgctcggggtctctctggtgaaatcgtccccgcaggaggagggctgagggcagggctcggctcggctcggttcgtttcggcaggagttatctcagggtttttctcttgcttttctgcgccttcggactcgggcttacagttacagcatctggaaaatggcgtcacaggagagctcaaaaatgcaagaggaagggagtgggagacaagtgccggaagggcccattcactgtttgaacaactgcggcttcttcgggagcgcggccaccatgaacttgtgctccaagtgctacagagagcttaacg

SEQ ID NO: 1724 - DNA, 265 bp, Pinus radiata
cggattccgacccttccggctaaagctgctgcatttctgtgtgtattgaagatggggagatctccctgctgtgaaaaagctcatacaaacaaaggggcgtggaccaaagaagaggacgatcgcctcatcgcccacattcgaactcacggcgaaggttgctggcgctcgcttcccaaggccgcagggctgatgcgctgcgggaagagctgcaggctccgatggataaactacctgcgtcctgatctgaagcgtggaaacttctcag

SEQ ID NO: 1725 - DNA, 284 bp, Pinus radiata
caagagtaaacccgaaggaatagaaggggaaggaggcatcggcagcgttgttcctcctcctctcctctcctgcatttctcaaactcaaatacctctcctctcacaatcatggaaggcggagtcgtctttgaatctgtgcaaaacccactggatcgcctgaacactggaaatatggaccatggttgtgcccattacaggagacgatgtcggattcgggccccttgttgcaatgagatctatgattgtaggcactgtcacaatgaaaccatgagccatctaaagga

SEQ ID NO: 1726 - DNA, 308 bp, Pinus radiata
caaaccgccaagtgagcttcatatctaaccaataataacacctgtatagcttcacagcaacagggcaccatgggccgagctccttgctgtgataaaatgggagtaaagaaaggcccctggactctagacgaagataaaatactggtcgactacattaccaaacatggccatggcaactggcgtgcactgcccaagcaagcagggctcctgcgatgtggaaagagttgtcgcctgcggtggacgaattacctgaaacccgacatcaaaagagggaattttagtccagaagaggaagatcaaattattaa

SEQ ID NO: 1727 - DNA, 338 bp, Pinus radiata
gacgagcggttgttcattaagcatggagccaaagtcataatcgcagacgtcgcggagaaagctggcaggaagcttgaggaatcactttctcccgctgtggcaacttacgtgcactgcgatgtgagcaaagaagaagatgtgaccgcggcggtggatgtggccatggataagtatggccaactggacattatgtataacaacgctggaactaatgacagctttttggtgaagagcgtggtagagtatgatatggagcaattcgatcgagtgatgaatgtaaacgtgaaaggagtgatgcacggcattaagcaccccgcccgcgttatgatcccgcggaa

SEQ ID NO: 1728 - DNA, 350 bp, Pinus radiata
  misc_feature (1)...(350): n = A,T,C or G
gcacgaggttttaacatcttttgttgatatccagaggcttgatgatgtgaaaaatgccataacaccatctaccaaggttttgtattttgaatctatctcaaacccaactctggcagttgcagacatcccatctctgtctgccattgctcatgagaaaaatgtcaaggtggtggttgataataccttttctcccatgatcatatcccctgcaaagcttggtgctgatgttgntattcacagcatttcaaaatatatcagtggaggtgctgatgttatagcaggagcaatatgtgggcctgcagatctgataaattccatgatggatctccatcagggaaccttgatgctct

SEQ ID NO: 1729 - DNA, 333 bp, Pinus radiata
ccagtccatggtttcaagttagttagtccaataaagcagagatgggtcgtgctccatgctgcacaaaagttggtctcaacaagggagcatggtctgccgaagaggatagtcttctgggaagatatattcaaactcatggtgaaggcaattggaggtctctgcccaagaaagcagggctgcgaagatgtggaaagagctgcagattgcgttggctaaactatcttcggccatgtatcaagcggggaaatattacaacagatgaagaagaacttattatcagaatgcatgctctcttgggcaaccgatggtcgataatagcagggagagtccccg

SEQ ID NO: 1730 - DNA, 508 bp, Pinus radiata
  misc_feature (1)...(508): n = A,T,C or G
ctngtgccgaagaaatctgaatcgtcgcgttcgtggtcgacaggaagccacagtgggcggcctgagaaactggttgtggtggtcgggagtgtcaagattgtgacggtgggcggaccagcgtctagtttgtgttggtggtcggcattagaaggggcagagggggcttttcagtgcatgggattatgggcaacgaaggcgcggcatcgatgcggctatggggcgacgataataattccatgatcgaggctttcatggggaacctcgattactcttactccaccttctggaatggcatcgatgccaatccctcttcgctaccctcgcccgccacttcccgtcgtctgccgcagtgttgctatcgccacgcccttcaatcaggacacgctgcagcaacgcttgctggcgtttgtggagggagcggctgagtgctggacttatgccatattctggcagttgtcgagcgatgccagcggcggctcggagcttgtctggggcgacgggtactaca

SEQ ID NO: 1731 - DNA, 411 bp, Pinus radiata
  misc_feature (1)...(411): n = A,T,C or G
cggagtgaaatcatttgctgccgtcactgctgccaaggtttgttactgttagattttgttatancggacaatggcttcaacagacatagatatgattcccgtgccctctggcgagggttccagctctcaagcgggaccaagcgcttccaccaagaaggccaaacgtttcgaaatcaagaagtggaatgctgtagccctttgggcgtgggatattgtggttgataattgtgcaatttgcagaaaccacatcatggacctctgtattgagtgtcaggcaaatcaagcaagtgcaacaagtgaagaatgtactgttgcatggggtgtttgcaatcacgcctttcatttccattgcataagtcggtggctcaagacacgacaagtctgcccattagataataagtgagtgggagt

SEQ ID NO: 1732 - DNA, 390 bp, Pinus radiata
cgaaactcgaatcgatatgctttgtggccggttcaaatatttgagctggcttagcttctctggttcagaaatggcggactaaagtaatagtgtgccccgaggtctggtgttcgaatctcgttggcgtgaaaggtcaaatttttctctcgagtttcattgattctgaaaaactggcatagctatggcgatgagcaatgggagattgtgtgaagatttggataggattaaggggcccgtggagccccgaggaggacgcgtcgctgcagaggcttgttcagaaatacgggccgaggaactggaccctgataagtaaaggaatcccggggcgatccgggaaatcgtgcaggctacggtggtgcaatcagctgaccctcaggtggagcacagacc

SEQ ID NO: 1733 - DNA, 277 bp, Pinus radiata
atttactggaaccattgttggaataagtgatgctgatcctgtgaactggccgaattcaaagtggagatgcctcaaggtacaatgggatgaaatatcagcaattgcacgaccagagagagtttccccgtggaaattagaaccttcattaactccagtggcagtgaatcctctgccagtagccaggggcaagaggcctcggccaaatatattaccttcatcttccgatttatcagtgcatgacaaggccccagtggattctactcaggtgcacaggttt

SEQ ID NO: 1734 - DNA, 221 bp, Pinus radiata
gttgcagggaagggttgccgtgatcacaggaggcgccagtggaatcggagaggctaccgccaagttgttcgtggagaatggagcgaaagtagtgattgcagaccttcaggacgaccatggaaaccgtcttgctcaatccctcgctcccaacgcctgctttttccactgcgatgtctccaaagaggcggacgtttccgccgtgctggacttggcgctggaga

SEQ ID NO: 1735 - DNA, 316 bp, Pinus radiata
  misc_feature (1)...(316): n = A,T,C or G
tgggctgttcccaggagaggagagcctcagctgtctcgatctggcgttaaggggttacagaagaagaatttcgaagatggttagatcttcttgctattcaaagcaaggtcataggcgtgggatttggacccctatggaggatatgattctctctgaatacnttcgaattcatggcagtgatggatggaaaaatatcgctaaacgagcaggtcttaaacgatgtggaaagagttgcagattaccgttggttgaactatcttcgccccgacattaaacgtggtaacatttctcctgatgaggaggacctcattattag

SEQ ID NO: 1736 - DNA, 464 bp, Pinus radiata
cagcatcgtggctcttcccggcagacctagtaagccgactactgtaaatttattcttttagggttacagaagaagaaaatacaagatgggcagatctccttgctgctcaaaagaagggctcaaccgtggggcctggaccaaaagggaggatatgattctctccgaatacattcgaattcatggcgatggcggatggagaaatatgcccaaaagagcaggtcttaaacggtgtggaaagagctgcagattacgatggctgaactatcttcgccccgacattaaacgtggaaacatttcccctgatgaggaggaactcataattcggctccatcgccttcttggcaatcgatggtcgcttatagcaggaagattaccaggtcgaacagacaacgaaatcaagaactactggaacactcatatgagcaagaagctgcttccattgaacgaatctcaacccaagactt

SEQ ID NO: 1737 - DNA, 361 bp, Pinus radiata
aaggaggcatcggcagcgttgttcctcctcctctcctctcctgcatttctcaaactcaaatacctctcctctcacaatcatggaaggcggagtcgtctttgaatctgtgcaaaacccactggatcgcctgaacactggaaatatggaccatggttgtgcccattacaggagacgatgtcggattcgggccccttgttgcaatgagatctatgattgtaggcactgtcacaatgaagccatgagccatctaaaggaccccttgctgcgccatgagctcccaagatacaaagttgaacgggttatttgttctctctgtgacactgagcaaaatgtcaagcaagtttgcgaaaactgtggtgtt

SEQ ID NO: 1738 - DNA, 371 bp, Pinus radiata
gcttttctgtttcattcgatttcgattgtgtagtgaagagcatggccgaacaggtcttggaagggagtcagccagtggatctcgagaagcatccttcaggcatcgttcccaccctccagaatatagtgtccactgtaaacttggattgcaaattggacttgaaagccattgctcttcaagctcgaaatgcagagtacaatcccaagcgttttgcagcagtcataatgagaataagggagcccaaaactacagcactgatatttgcatcagggaagatggtttgcacaggtgcaaaaagtgaacaacagtcaaaacttgctgcaagaaagtatgctcgtattatccaaaaattgggctttcctgctcatttc

SEQ ID NO: 1739 - DNA, 589 bp, Pinus radiata
gtctcagggtaacgaaaatggggaaggtgacaatatggctgcatggctcactggaataaacactcttcgcatccagcccttcaaacttccgcctcttggcccccatgatgcgaaggtgcgcatgaaggctgtgggtatctgtggcagtgacgtccactatttgaggacattacggtgtgcggactttattgtaaaagagccaatggtgattggtcatgagtctgctggaataattgaggaggttggcagtgaagtgaaacatctggttcctggtgaccgcgtagctttggagcctggaatatcgtgttggcgttgtgaccaatgtaagcgaggctcctacaatttgtgtcccgagatgaagttttttgcaacacctcccgtgcatggttccttggccaatcagattgttcatcctgcagatttatgtttcaagttgccagataatgtaagtctcgaggaaggtgccatgtgtgaaccactcagtgttggggttcatgcttgtcgccgtgcttctgtaggccctgagacaaatgtcttggtaatgggggcaggtcctatcggccttgtcaccgtgctgtctgcacgtgca

SEQ ID NO: 1740 - DNA, 473 bp, Pinus radiata
ctttgccgtgttcggttcgtattcagggtttcgggagcttgttgtgtggtgttctgcaggtcaggacattgtaggcctggttatacaagatttcgaagcaaactctcggagcctcgaagaatcggcgcaaatttcaacggccttataactatttgggaagcagtactctggatttttctcccggaacggatcggagtgtgggaagcgtaataatcgcctggaatttgtcttctgcaagataatattcaattaatctattgtcgaaggaaatttgagccgtataagaggataatcaaaagaagccggttgatttctccgggattaaaggatggatcaagaaaactggaacatcggagctgatggcactggctgccaagctccagaagggcacactctttgcgccaataactgcggcttttttggcagttcggcaacgagaaacctgtgttcgaaatgttacagggatctgatta

SEQ ID NO: 1741 - DNA, 546 bp, Pinus radiata
atccaaataatacaactatctttgtgggtggcttagacccaactgtgacagatgatatgctgagatcattatttggtcagtttggagaacttgtgcatgtcaaaataccagtgggaaaacgttgtggatttgttcagtttaataacagggcttctgcagaggaagcattgcaaatgctgcatggtacagttcttggtcagcaagccattcgtctttcctggggacggagtcctgcaaacaaacaaactgctgggtgggttcaaccccaacaaccagatccaaatcaatggaatggagcttattatggttacggacaaggatatgatgcaggttatggttatgcaccacaacctcaggatcccaatatgtacagttatgccccttatgcatatggaaattatcagcagcagtaacatttacttgggttcaggctcttctgtggacgtggaaatatgggttcattcatagagctgtctctgtaaacagttgtttttaacgggcatccagtcaacttatctatattaaatttaatgaagaggaaagtct

SEQ ID NO: 1742 - DNA, 348 bp, Pinus radiata
agcaacctacgcttgagcagccgaatgcgaagcacccatcgattccgcttccctcggcgttggtgccctcaagtagcgacgttccaatggtggaagcagtagcagcagcggagacggccattggcaccgctccatccagctcggcagaacaggaggtggagaaacatgaacaggacgaggaggaacagctgaggaagagcaagaagaggtgttttgcgtgtaacaggcgggtggggctgacgggctttaagtgccgctgtggtgaccttttctgcgctcagcacaggtactctgatatgcatgactgctcttttgactacaagactgccggccgcctcgccattctca

SEQ ID NO: 1743 - DNA, 300 bp, Pinus radiata
  misc_feature (1)...(300): n = A,T,C or G
cgaccatgcttcaagtgctgtcatggtggttgtgtcatcagcccctcaaattatgntgctcatgaaggcaggctatattgtaggcatcatagctctcaactttttagggagaaaggtaacttcagccanctttcaaaggcaacacctacaaaaggggtgactgataactcagacacagacnacaagtgatcattcgggccagatttttgctgacagagttgtagtgtgttattgattcatttcatacatttgatatgcaagcctgtacaatatcctgtgactgttaaaggcattcttttg

SEQ ID NO: 1744 - DNA, 355 bp, Pinus radiata
ggctcttcccggcagacctagtaagccgactactgtaaatttattcttttagggttacagaagaagaaaatacaagatgggcagatctccttgctgctcaaaagaagggctcaaccgtggggcctggaccaaaagggaggatatgattctctccgaatacattcgaattcatggcgatggcggatggagaaatatgcccaaaagagcaggtcttaaacggtgtggaaagagctgcagattacgatggctgaactatcttcgccccgacattaaacgtggaaacatttcccctgatgaggaggaactcataattcggctccatcgccttcttggcaatcgatggtcgcttatagca

SEQ ID NO: 1745 - DNA, 294 bp, Pinus radiata
attgcttgaaagagatgcacgagcatcttcaatttgcttgtccagtgtgctccaaatctgtctgtgatatgtctaaattgtgggagaaacttgaccgagaggttgctttgactccaatgcctgaagcttaccagaacaaaatggtttggatcttatgcaatgattgtggagtaacttctgaagtaaattttcacattgttgcacacaagtgtcaaagttgcaattcttataacacccggcagaccaggggaggtccttctgcaagttcatgtagatctcatctttgatattctc

SEQ ID NO: 1746 - DNA, 316 bp, Pinus radiata
  misc_feature (1)...(316): n = A,T,C or G
aaccgcctcttcttatactagtgcctttatcggnnccattcaaacttgctcacggattccgacccttccggctaaagctgctgcatttctgtgtgtattgaagatggggagatctccctgctgtgaaaaagctcatacaaacaaaggggcgtggaccaaagaagaggacgatcgcctcatcgcccacattcgaactcacggcgaaggttgctggcgctcgcttcccaaggccgcagggctgatgcgctgcgggaagagctgcaggctccgatggataaactacctgcgtcctgatctgaagcgtggaaacttctca

SEQ ID NO: 1747 - DNA, 263 bp, Pinus radiata
gtggctgttcccaggagaggagagcctcagctgtctcgatctggcgttaaggggttacagaagaagaatttcgaagatggttagatcttcttgctattcaaagcaaggtcataggcgtgggatttggacccctatggaggatatgattctctctgaatacattcgaattcatggcagtgatggatggaaaaatatcgctaaacgagcaggtcttaaacgatgtggaaagagttgcagattacgttggttgaactatcttcgcc

SEQ ID NO: 1748 - DNA, 145 bp, Pinus radiata
  misc_feature (1)...(145): n = A,T,C or G
ttcggtcggagaattgtgggtgggagccccaccggaggagtganggaaactcaagagatgttggacttttgtgcagagcataacatcagttgcatgattgaaaacattgcaatggattaccgtgaacacagcaatcgaacgatta

SEQ ID NO: 1749 - DNA, 206 bp, Pinus radiata
  misc_feature (1)...(206): n = A,T,C or G
ctggtgtgaatcacatcggagatggcattcgcaggaacacagcanaagtgcaaggcatgcgagaagacggtgtacgtggtggatcagctcacagccgatggttcagtctttcacaaggcctgcttccgctgccatcattgcaatggcaccttaaagctcagcaactattcttcttttgaaggggtgctgtactgcaaacctcactt

SEQ ID NO: 1750 - DNA, 263 bp, Pinus radiata
gttaaatttgaccccttcaatgcgttttatggttcagcctctatgttaatttgacacagtgagctgaaatattgcggctggatgtgtacattcacgactatctcataaaacggaatcttcttgcatctgccaagacatttatgacggaggcaaaagtttctccagaaccagtcgcaattgatgcacctggaggctttttgtttgaatggtggtctgtgttttgggatattttcatctcacggacaaatgagaagcactctgag

SEQ ID NO: 1751 - DNA, 321 bp, Pinus radiata
ccaatatgggggcagatagtatggttcctgttcacactcctgaagttattgagcattcttctacaaaagtttctattgatacagctgggtcaatggatgtggatgcagcatccaagtgcaatcacgtttacagaactacatctctcaaccactgtgtctcttcctcccccatagatgttggaattgtacctgacagcaacattacatctgatatttcaacaccttaccatgacccaagaggagtattcgagattcctcctcgggttgttcatcctggaggccaaggtgaggtcatgggaagagaagcaagagttctcagat

SEQ ID NO: 1752 - DNA, 316 bp, Pinus radiata
cggcccgagcaattttgcttctctgctaaacgatgggaagagcgccttgctgtgccaacggtgacagaagcaagggagcctggaccaaggaagaggatgacaggcttacccaatatattcaggctcatggagaaggatgctggcgttctctccccaaggccgcaggtctgcttcggtgtggaaaaagttgcaggctgagatggataaattatcttcgccctgatctgaaacgaggaggtttttctgaagatgaagacgatcttattctcaaactgcacgccctcctcggaaataagtggtctctgatagcgggtcg

SEQ ID NO: 1753 - DNA, 335 bp, Pinus radiata
attgagtaaaacttcattcagttggattctcatcgttttcatggcttacaacccgcaaacatgccgccgccgccaccagcccggacagcagcctgggctcagacaacgagtccggcggcggaggaggaggcggcggaggagaagggcagtcgacgaagaatggcaatggcaactacattagagagcaggatcgcctgctccccatagcgaacgtggggcggataatgaagcgggcgctgcggggaatgcgaaaatctccaaagacgcgaaggagacggtgcaggaatgtgtgtcggagttcatcagcttcattaccggcgaggcctctgacaagt

SEQ ID NO: 1754 - DNA, 349 bp, Pinus radiata
  misc_feature (1)...(349): n = A,T,C or G
cacacagaagcttgtccgatggcgatcacgcaggggaaatggctacaggtgaatcagaaggaaggggggccaaaagcgcggagctcccatgcagttgcagtggtgggaaaaaaggcgtatgtgttcggtggagaggtggagccgcgcgtgccagtggacaatttgatgcatatcttggatctggaggacaattcctggtccgtggcggatgccaagggagaggcaccgcctcccagagtgggggtcaccatggtccctatcggctctgttatttatctcttcggtggtcgagaccagcatcacaaggagctcaaccatttctattccttcgatacnaattcctgccagt

SEQ ID NO: 1755 - DNA, 289 bp, Pinus radiata
  misc_feature (1)...(289): n = A,T,C or G
tcttaatgccctaaaggagcccagcaagaagatcgacggccgcatgactgtcagtcagttggcctctgctggttcacagcctgcccagccggcggctgatgtatctgcccggaaaatctatgtcgggaatgttcccatggacatggcggcagatcgcctgctgagccttttttctcagtatggagagatcgaagaggggccactagggtttgataagcaatcgggcangtcaaggggttttgcgctttttattttcaagtcangtggacgcaactaagcgtgcgttgga

SEQ ID NO: 1756 - DNA, 235 bp, Pinus radiata
agagtatgatcctgttgctaaaatttcaatcattcctcgtggacaagctggaggtctgacattctttgctcctagtgaagagagactggaatctgggctttacagcagaagttaccttgagaatcagatggcagttgccctcggtggaagggtggcagaagaagttatttttgggaaagaaaatgtcacaacaggagcatcgaatgacttcccacaagtatctcgtgttgcccgg

SEQ ID NO: 1757 - DNA, 457 bp, Pinus radiata
gtaggatggaaggcacgggtaagagattcaaagggaaggtggcggtggtgaccgcttcaacacagggcataggattcgccattgcacagcaccttggcctcgaaggtgcttccgttgtcgtctcttcacgcaaaaagaacaatgtagaggaagcagtggaaaagatgagagccaaagggattgatgttctgggagtggcctgccatgtttccagtcgagaacagaggagggatctcatccaaaagactgtagataaatatggtcacatagacattctggtctcaaatgcagctgctaatccaactgtgaagcccattgttttagttccagagcctgtacttgataaaatttgggagattaatgtcaaggccactattcttcttgtccaggaagctgctgctcacttgtcacaagagtcatcaattatcataatttcatcagttgctgcttacagacc

SEQ ID NO: 1758 - DNA, 345 bp, Pinus radiata
catgtctttgattcgggcaagcagacatggagtaagcctatggtgaaaggaaccccgccctctcccagggacagccacagctgtaccactgtgggaacaaacttgtttgtatttggtggcacagatgggaagaaccctctacgggatttgcatatgctggacactactacaaatacatgggtgcaacctaacgtaagtggtgaaggaccggcagctcgtgaggggcacagtgctgcactcattgatcaccgtctttttatatttggaggttgtggaaaagttcaagatgaatctgaagagatatattacaacgacctttacatactagacacagttaacttaatt

SEQ ID NO: 1759 - DNA, 544 bp, Pinus radiata
gagcaacccacattgcattgattgcactacagtttcagcgattttcaggtcatctcaggtgtgcagcttaagcttattctcttgaaaatatggctgaggaaggagagaaggtcatggtaaacgtttatgatctaagccaaggacttgctcgtcaactctcaactacttttcttggaaaagccattgaaggaatttggcataccggtgtggtagtttatgggaaggagtattactttgggggtggtattcaacacagccctacagggcaaactccatatggaaaaccgtggaaagtggttgagttgggtgtcactcacgttccgatggaaatgtttgaagaattcctggaaaaaataagccctcgctatacagcttaaacatatagtttggtgcaccataactgtaacaacttcagcgatgaggttgcacagtttttggttggctgcaacatcccagatttcatccttaggctcccacaagaagtgatgaacagcccaatgggccctttaataatgcccatgataatgcagtttgaagctactct

SEQ ID NO: 1760 - DNA, 375 bp, Pinus radiata
  misc_feature (1)...(375): n = A,T,C or G
cgatagccgagagcacccttatctcctccactctgtttcatacatgcaacaagctctggcagcagcaatggcggcccagactatcatcgctgcctctatggcatctcctctaacattatcaaatggccactatccgtttcagtccgagttcaaggggtccgtggttcgaatcccgcagagggcattttccttcgcgcctgcagcccgggcgctgaccgtcgtcgcanaggccaagaaggccgttgccgtgctcaaaggaaattcacaggtcgagggtgttgtcaatctctcgcaggaagacaacggtcccacaacagtgaaggtccgtttgacaggactgactcctgggaagcatggctttcatctacatgagtt

SEQ ID NO: 1761 - DNA, 333 bp, Pinus radiata
tttatatttttacaatccgaggttgcagggactttcagagaggtcgataccgtggaaaagactgagattgacggatcgattgcaatggcgtttgcggaagagtattccgatcgcgatgccgtatttcaaaagctgaaggcgaagtctgaaaacaagatttgttttgattgcaatgctaaaagtcccagttgggccgtccgtgacatatggagtattcatttgtcttgattgttcagcaatgcatcggagtcttggtgttcatgtcagttttggaggtctacaaatctcgatacatggaccatggagcagttgaaattgatgagctttggtggt

SEQ ID NO: 1762 - DNA, 331 bp, Pinus radiata
  misc_feature (1)...(331): n = A,T,C or G
ctcgtgcccgactataggccgcaccaccctcagccgtttcttctttgcctctcttcttcttgtgggccatgtgacctatggcctattcattttctgcactggatctgagagcgagggggaagttaacgagagccctggctccacgaattttgaaggcggcgcggncatatgcgagagcagcctcttcggcggtgatgaaagngccgagccaaactctggtcctcttggcggggtctctgatttcagctgcgaatttaccccacggccgctgccggactcctctgtagcgcctagctccgctcatctgcttcatctctccactctgctcttc

SEQ ID NO: 1763 - DNA, 568 bp, Pinus radiata
ccggccgccccctccgacctgcctgatggaacacagtggcgctacagcgagttcttgaacgccgtgaagaagggtaaggtggagcgcgtccgcttcagcaaggacggcagctacctccaactgagcgccgtcgatgggaggcgtgccactgtaaccctgccaaacgacccggacctggtggacatccttgcgatgaatggtgtggacatatcggtttccgagggggaggcgagcaatggcctcctcagcgtaatcggtaatcttttattcccaattttagccttcgggggtttattcttcttatttcggcgggctcagggaggccctgggggtcccggaggtttgggcggccctatggacttcggtcgctctaagtccaagttccaggaggtgccggagactggagttacatttgccgacgtggcaggcgctgaccaggccaagctggagcttcaggaggtggtggatttcttgaaaaaccctgataagtatactgcccttggtgccaagatccccaagggatgcttgttggtaggtccgccggggacgggcaagactctactggccc

SEQ ID NO: 1764 - DNA, 351 bp, Pinus radiata
gagaaggaagctgctcttgctgccacaccaccagaagatgataaacctacaatatttgacacaatactgcagaaggagattcccagtacagtggtttacgaggatgagaaggtacttgcattcagggatatcgcaccccaagcacctactacatcattatcatccccaaagtaagggatggcttgactggcctatctaaggcagaagagaggcatgaggatatttaggtcacctgctatacactgcaaaagttattgcaaagcaggaaggtttatctgatggcttcagaattgtcattaacgatggtcctactggatgccaatctgtgaccatttacatattcatctactc

SEQ ID NO: 1765 - DNA, 462 bp, Pinus radiata
tgtaaatttattcttttagggttacagaagaagaaaatacaagatgggcagatctccttgctgctcaaaagaagggctcaaccgtggggcctggaccaaaagggaggatatgattctctccgaatacattcgaattcatggcgatggcggatggagaaatatgcccaaaagagcaggtcttaaacggtgtggaaagagctgcagattacgatggctgaactatcttcgccccgacattaaacgtggaaacatttcccctgatgaggaggaactcataattcggctccatcgccttcttggcaatcgatggtcgcttatagcaggaagattaccaggtcgaacagacaacgaaatcaagaactactggaacactcatatgagcaagaagctgcttccattgaacgaatcttaacccagactttgcctgtccccaaaaagaggtcgcaatcttcttctccctgc

SEQ ID NO: 1766 - DNA, 532 bp, Pinus radiata
  misc_feature (1)...(532): n = A,T,C or G
gtaaaaatgaccacggcgtggacttctggaacnccccggagcgttcaggatggttgatgaagcagggcgagtacatcaaaacatggaggcgcagatggtttgttctaaagcagggaaagctcttctggttcaaggaaaattacatcacaagggattctaatccccgtggtgttgttccggtgagcacctgcctgactgtcaagggagccgaagacgtcctcaacaagccattcgccttcgagctctcgacgagcagagagaccatgtacttcatcgcagacagcgataaggagaaggaggagtggatcaattccatcggccgctccatcgtacagcattccaggtcagttacagacaaggagatcgntgattatgatagccagcgtgccgataaatgaatacccaattcgaatcggatggattcgctgtaaattggttgcaattagggtttctaggggtttcttttgaattttgtgatggaacgccttaaatcggttgtccattgcatttctaggatgaatcttaataaatt

SEQ ID NO: 1767 - DNA, 354 bp, Pinus radiata
aaccgcctcttcttatactagtgcctttatcggttccattcaaacttgctcacggattccgacccttccggctaaagctgctgcatttctgtgtgtattgaagatggggagatctccctgctgtgaaaaagctcatacaaacaaaggggcgtggaccaaagaagaggacgatcgcctcatcgcccacattcgaactcacggcgaaggttgctggcgctcgcttcccaaggccgcaaggctgatgcgctgcgggaagagctgcaggctccgatggataaactacctgcgtcctgatctgaagcgtggaaacttctcagaagaagaagacgaactcgtcagtaaactccacttcct

SEQ ID NO: 1768 - DNA, 430 bp, Pinus radiata
cttcgacggcgcgatagccgagagcacccttatctcctccactctgtttcatacatgcaacaagctctggcagcagcaatggcggcccagactatcatcgctgcctctatggcatctcctctaacattatcaaatggccactatccgtttcagtccgagttcaaggggtccgtggttcgaatcccgcagagggcattttccttcgcgcctgcagcccgggcgctgaccgtcgtcgcagaggccaagaaggccgttgccgtgctcaaagggaattcacaggtcgagggtgttgtcagtctctcgcaggaagacagcggtcccacaacagtgaaggtccgtttgacaggactgactcctgggaagcatggctttcatctacatgagtttggtgacacaaccaatggctgcatatcaacaggagcacatttta

SEQ ID NO: 1769 - DNA, 407 bp, Pinus radiata
gaacgaacggtgaagatacacagaggatctctcaacggcttcatctccgtcgtcgtctctcctccttccatctccagcgtccgatctgatcttatcaaaggaagcccttaaatccctccagctttccaagcgcgggttctgttgctgtatcccaggtccctggtcatatggcggaagctggcagcccgggcagccaggaaagtcctcgttccggggaacaaagcccccagtccagcgtgcgggagcaggacaggttcctacccatcgccaacattagccgcatcatgaagaaggcgctgccggccaacggcaagatcgctaaagacgccaaggagaccgtgcaggagtgtgtctcggaatttatcagcttcatcaccagcgaggccagtgacaaatgccagcgagaa

SEQ ID NO: 1770 - DNA, 347 bp, Pinus radiata
cagacttttgctccgaactgttctggtgaaacaaaatccagtattgagctaggtttagaatcgggtttgctggtcatctgggagaggcgatccattcagcttcgcaggcccccgaagatggcgttcgccggcacaacccagaagtgcaaggcatgtgaaaagacggtctatttggttgatcaattgacagctgataattctgtttttcacaaatcctgtttccgctgccatcactgcaatggaactttaaagcttagcaactattcgtcgtttgagggagttctatattgcaaacctcattttgaccagctgtttaagagaacaggaagtttggataaaagttttga

SEQ ID NO: 1771 - DNA, 469 bp, Pinus radiata
cgatagccgagagcacccttatctcctccactctgtttcatacatgcaacaagctctggcagcagcaatggcggcccagactatcatcgctgcctctatggcatctcctctaacattatcaaatggccactatccgtttcagtccgagttcaaggggtccgtggttcgaatcccgcaaagggcattttccttcgcgcctgcagcccgggcgctgaccgtcgtcgcagaggccaagaaggccgttgccgtgctcaaaggaaattcacaggtcgagggtgttgtcaatctctcgcaggaagacaacggtcccacaacagtgaaggtccgtttgacaggactgactcctgggaagcatggctttcatctacatgagtttggtgacacaaccaatggctgcatctcaacaggagcacattttaatccaaaaaaattgacacatggtgctcctgaggatgatgtacgccatgcg

SEQ ID NO: 1772 - DNA, 461 bp, Pinus radiata
tcttacccttttcctgagccaccgagaatttcctctccggaatacccacttctcagagattcttgctgcgaactctgttttcttcagcgagatttgtcagtgaattgtgaggagtattgagtcttatcatgcggatccagtgcgatgcctgcgagcaggcaactgcttcagtgatatgttgtgcagacgaggctgctctgtgcagggaatgtgatataaaagtccacaaggccaacaagcttgccagcaaacacaagagattatctctcctcgaaacttctcgaaagctctctcgctgcgacatttgccaggatagggccgccatcgttttctgtctcgaagatcgtgctatgctgtgccaagactgcgatgagtccgttcattctcgcgacacattagcagcaaaacaccaaaggttcctggccactggcattagggtaggtctcaatgccctgtcatca

SEQ ID NO: 1773 - DNA, 332 bp, Pinus radiata
gacaatatggctgcatggctcactggaataaacactcttcgcatccagcccttcaaacttccgcctcttggcccccatgatgcgaaggtgcgcatgaaggctgtgggtatctgtggcagtgacgtccactatttgaggacattacggtgtgcggactttattgtaaaagagccaatggtgattggtcatgagtctgctggaataattgaggaggttggcagtgaagtgaaacatctggttcctggtgaccgcgtagctttggagcctggaatatcgtgttggcgttgtgaccaatgtaagcgaggctcctacaatttgtgtcccgagatgaa

SEQ ID NO: 1774 - DNA, 322 bp, Pinus radiata
ctcctgtgcagcgtacgccttcgcctttgcgatttcgagccccattggaattgccattggaatacttattgacgccactacagagggccgagtggcagactggatttatgcaatctcaatgggttttgcgtgcggtgttttcgtttatgttgccatcaaccatcttctgatgaaaggattaatacagaaccctctgaaaggtgtgattcgctttgacaaacccttttacaaatatttggctgtactcactggagctggactgattgcagtggtaatgatttgggacacctagtggtaatgaattgggacacttcttagctgc

SEQ ID NO: 1775 - DNA, 428 bp, Pinus radiata
  misc_feature (1)...(428): n = A,T,C or G
gagagagagagagagagagagagagagagagagagagactcnngccganttcgnnacnagcgaagccngtttccaaanatggatngggagaaactcatgaagatggctggtgcagtccgcactggcggaaagggtacaatgcgaaggaaaaagaagacaattcataagactgccacggcagatgacaagagacttcaaagtaccttgaaaagaataggcgtgaataacatccctgctattgaagaagtcaatatttttaaggatgaccatgttattcattttgctaacccaaaggtccaggcttctattgctgccaacacatgggtggttagtgggtcatcgcaaacaaaaaaacttcaagatcttttccctggtatcatcaatcagcttggaccagagagttttgccaatctgaggaagattgcaga

SEQ ID NO: 1776 - DNA, 512 bp, Pinus radiata
ataaaaccctaaatctctgcactcgccagctacgatttattctgcctccagcattttggtccttaccagtttgggcctctttttgcggtttctacacatagccgctgcgattctggggagtttctttggcttagatttttggggtaaaattctgggtattgtggtttgctcacactaattatcctgtcatggatcatcaacagcagcagtggatgatgcagcaacaaactcaacaacagtatcagcagccgcagtattcgaatgacgaaatccggacactttggatcggggatttgcagtattgggtcgatgaaaattatctccatacttgcttttcgcaaaccggagaggttgtgtctataaaggtgattcggaacaaggctacaggctatccggaaggttatggttttgtggagtttatttcccatgcagcagctgagaggattcttcaaacatacaatggtacacagatgcctggcacagagcaactttatagattaaattgggcttcc

SEQ ID NO: 1777 - DNA, 498 bp, Pinus radiata
ggatggaaggcacaagtaagagattcaaagggaaggtagcggtggtgaccgcttcaacaagggcatagggttcgccattgcagagcgccttggcctcgaaggcgcttccgtcgtcgtctcatcacgaaaacagaaaaatgtaggggaagcagtggaaaagctgagagccaaagggattgatgttctgggagtggcttgccatgtttccagtcgagaccagaggagagatctcatccaaaagactgtagataaatatggtcgcatagacattctggtctcaaatgcagctgctaatccaactgtggaccccattgtttcggttccagagcctgtacttgataaactttgggagattaacgtcaaggccactattcttcttgtccaggatgcttctgctcacttgtcacaagagtcatcaattatcataatttcgtcaattactgcttacaggccagaggcaatgatggccatgtatggggttaccaagactgctctttt

SEQ ID NO: 1778 - DNA, 435 bp, Pinus radiata
ggcgacacatggcccgtgtcaggcgccttgagaggccacaagcgtgcaattctatgcttggcgagtgttgcagaatttttatgcagtggatcggcggataatactattagaatgtggaaaaggggagaaggaaacaggcattactgtttggcggttttagaaggtcacagaggacctgttaagtccatcgcagtgtctttagacactgtgaggggatgccacgtctacagcggaagcctggatcatgacattaaggtttggcgggttagttcaaataaaagcagttccgacgatcatgccgagggtgccaaccataacaatcgcttgaaaaccatacactcccctgaggaaagcgtttttcattcaaggcaaatttttggtatttcatgaaactgatgtagccatctacgtgtcaactaactacaatatgcctgt

SEQ ID NO: 1779 - DNA, 470 bp, Pinus radiata
gccatggctgcatttcgcagggttctgttgctgtatcccaggtccctggtcatatggcggaagctggcagcccgggcagccaggaaagtcctcgttccggggaacaaagcccccagtccagcgtgcgggagcaggacaggttcctacccatcgccaacattagccgcatcatgaagaaggcgctgccggccaacggcaagatcgctaaagacgccaaggagaccgtgcaggagtgtgtctcggaatttatcagcttcatcaccagcgaggccagtgacaaatgccagcgagaaaagaggaagacaatcaacggcgatgacttgctctgggccatgagcacgctagggtttgaagattatatcgagcccttgaaggtttacttgctcatgtacagagaggcggagggtgacaataagggatcttcaaaatctggagtagaccaatatggaaagaaagagtcaaatgtacat

SEQ ID NO: 1780 - DNA, 359 bp, Pinus radiata
attcgttcgttccaacaacagcgaagccgatttccaaagatggatagggagaaactcatgaagatggctggtgcagtccgcactggcggaaagggtacaatgcgaaggaaaaagaagacaattcataagactgccacagcagatgacaagagacttcaaagtaccttgaaaagaataggcgtgaataacatccctgctattgaagaagtcaatatttttaaggatgaccatgttattcattttgctaacccaaaggtccaggcttctattgctgccaacacatgggtggttagtgggtcatcgcaaacaaaaaaacttcaagatcttttccctggtatcatcaatcagcttggaccaga

SEQ ID NO: 1781 - DNA, 360 bp, Pinus radiata
cggcccgagcaattttgcttctctgctaaacgatgggaagagcgccttgctgtgccaacggtgacagaagcaagggagcctggaccaaggaagaggatgacaggcttacccaatatattcaggctcatggagaaggatgctggcgttctctccccaaggccgcaggtctgcttcggtgtggaaaaagttgcaggctgagatggataaattatcttcgccctgatctgaaacgaggaggtttttctgaagatgaagacgatcttattctcaaactgcacgccctcctcggaaataagtggtctctgatagcgggtcgtttgcctggtcgaactgacaacgagatcaaaaactactggaact

SEQ ID NO: 1782 - DNA, 141 bp, Pinus radiata
cttctgtggattttatcaagaactctttaactagtgttgatgatgataaaggttcttttgcaccaacaaatttcattgagcaggctgatgaattgatccgaaaagagctggtgtcattactagagcacgacaatgcaaaat

SEQ ID NO: 1783 - DNA, 370 bp, Pinus radiata
atttgagtggggtgttttcactagcagaagcagcaaggtcagttttccactacagtactgcaacttcctcctatttcccacctcctcaagcttacccttctgacttcagttcccatcctgtgaatccaccatccaaacagctcaatgacacaaccagattagcccaagcattgttctgataattataatcctgacagttatattttttctctctgcatgtcttcacgttttaatcagatacttggcaagatctcccaatagagactccaacagctcaggggccataggtgcaatcgaagggcaactgcagcagctgtttcatctccatgacgcaagggttgagcaggccttcattgatgcattaccagtc

SEQ ID NO: 1784 - DNA, 381 bp, Pinus radiata
tggttttgatttgagtagcgggtttataagtccgggatttggtggtttttaaatggggctaagctattcttaattttgttctgttgggtacagcagagatttgaaggggatttgaatttgaatcatggaagttgagtgctgcagccctcggtcttccgctcaggggtgtgaggttgacatgaagccaacgatggtggtggaagatacgcttaatcaaggacgcatgcaatatggatgttcacactaccgccggagatgccaaataagggctccgtgttgtaatgaagtctttgactgtaggcattgtcataatgaggccaaaaattcaatggatgtccatccacttgacagacatgatgtaccgcgccatgaagttcgaaa

SEQ ID NO: 1785 - DNA, 441 bp, Pinus radiata
  misc_feature (1)...(441): n = A,T,C or G
cacaggcagcagataatatgaggcacaagaattcgtgccaatttcgtttctttgcttactatttcttccttcttctttaacaaatggatatattctaatcagtgcgctggtaatttgcaggttgcagggaagggntgctgtgatcacaggaggtgccagtggaatcggagaggctacggccaagttgttcgtggagaatggagcgaaagtagngattgcagaccttcaggacgaccatggaaaccgtcttgctcaatccctcgctcccaacgcctgctttttccactgcgatgtctccaaagaggcggacgtttccgccctgctagacttggcgctggagaagcacggacgtctcgacatagtgttcagcaatgccggaatcccaggcgggttattctcgtccatggcagacgtcactgtcgaggatttggaaagggtcat

SEQ ID NO: 1786 - DNA, 435 bp, Pinus radiata
caataatgcaggagtccctcaattagtgctcaaccttgtgtttgtcttggaattgagcaggcttctggccaactggcttctgtcccctttctggatatcagaccatcaatatggcgttcctctggatcagcccctcgccaattggcccatcactcctttaactaatcctgctagtcttcgttattctggcctcatcttctccgcttctcttgcgccttctgcccctgtttcccccaaccctgcataccctgaccagcagagcgttcgtgagaatttgcccgccgtcttcgactatgggagtctcagtgctgatcgccaggaggtggttgtctgtattgtttgtttcaatgagttcgtgtcgcgggatcgagtgcgccggctagctaaatgtggccatgttttccatatggagtgtttggataagtggatcgacta

SEQ ID NO: 1787 - DNA, 323 bp, Pinus radiata
gttgttcattaagcatggagccaaagtcataatcgcagacgttgcggagaaagctggcagaaagcttgaggaatcactttctcccgctgtggcaacttacgtgcactgcgatgtgagcaaagaaaaagatgtgagcgcggcggtggatgtggccatggataagtatggccaactggacattatgtataacaacgctggaactaatgacagctttttggtgaagagcgtggtagagtatgatatggagcaattcgatcgagtgatgaatgtaaacgtgaaaggagtgatgcacggcattaagcacgccgcccgcgtgatgatcc

SEQ ID NO: 1788 - DNA, 359 bp, Pinus radiata
cccttatctcctccactctgtttcatacatgcaacaagctctggcagcagcaatggcggcccagactatcatcgctgcctctatggcatctcctctaacattatcaaatggccactatccgtttcagtccgagttcaaggggtccgtggttcgaatcccgcagagggcattttccttcgcgcctgcagcccgggcgctgacagtcgtcgcagaggccaagaaggccgttgccgtgctcaaaggaaattcacaggtcgagggtgttgtcaatctctcgcaggaagacaacggtcccacaacagtgaaagtccgtttgacaggactgacttctgggaagcatggctttcatctacatgagt

SEQ ID NO: 1789 - DNA, 350 bp, Pinus radiata
ggatagttgtgctccgaggaaagcattgaattggggataatggcggaaactgtcacatattcatggccggtgggtttcgtctgtttcgttctgacgatgttactacttcaactctacagaatagtgtggagggaggacagtcgaggctacaatttgcctcccggttccagtgggtggccattgattggagagaccttgagcttcatgcgagggattaattccatttctaaaccacgccaattcattcaagatcgagagcaaaggtatgggaagatattcagaacaaatttgtttggaagatctcgaatgattgtgtctgtggacccagaattcaacaagtatattctgca

SEQ ID NO: 1790 - DNA, 337 bp, Pinus radiata
  misc_feature (1)...(337): n = A,T,C or G
gatttaggtagggttttaaggaagaaagacgatccaagcagtgggtttttatcgagctcccacgcagtttgaagggtgtcgcagcagaagaagatcggattcgttcatcctcatcacaaaagatggatcgggataagcttatgaagatggctggtgcagttcgtactggtggaaagggtacagtacgcagaaagaagaaagcagttcacagagccacaacaacagatgacaaaaggctccaaagtaccttgaagaggttaggagtgaatactattcctgctattgaagaagtaaatattttcaangatgagatggtcattcattttataaacccaaa

SEQ ID NO: 1791 - DNA, 315 bp, Pinus radiata
gtttgccattgaagaccaataaataattattgtgaagcagcagcgttttaatcagagatccagcaagaagaggaccaggaaaaatcatttgcagaacaagaagataatccaagatgtcaagcacacgcagccctcagtgtgggtgcggagaaacttgcgcttgcgccgattgcaagtgtggagttgtgagtattgcgcctccatccgaccaaacaagtgggggacatgcatattgcaagtgtggagaacactgcagctgcaatccatgtaactgttcaaagattgacgagactgttagtgggaaatccttctgta

SEQ ID NO: 1792 - DNA, 376 bp, Pinus radiata
gttttatcatgcggatccagtgcgatgcctgcgagcaggcagctgcttcagtgatatgttgtgcagacgaggctgctttgtgcagggagtgtgatataaaagtccacaaggccaacaagcttgccagcaaacacaagagattgcctcttgtcggaacttccccaaagctctctcgctgcgacatttgccaggatagggcagccatcgttttctgtctcgaagatcgtgctatgctgtgccaagactgcgatgagtccgttcattctcgcgacacattagcagcaaaacaccaaaggttcctggccactggcattagggtaggtctcaatgccctgtcatcagaatctccgggctcaagcgaatttgacaaacagcc

SEQ ID NO: 1793 - DNA, 407 bp, Pinus radiata
gggaattcccattctgcacatgcaatggacaatggaatgatggtatggatagttttagcaggggtagtggcaatggcagtgtggtatcttttggtacagcaccaacagcctaagcagagccacaatgttccttgggagactcttccaccgggggctgtgggatggccctttctcggagagatcatctctttctatttccgaacaccggattttgtgaagcagcggcggggaaggtatgggaatttgtttagaacgttcctgataggatatccaatggtaatctcaacagatcctgaggttaacaagtttattctgaataatgatggccggctgttcgttcctgcatatccgtcgcattggtcacagataatcggagagtgcaatatctttgctgctcgtggagactt

SEQ ID NO: 1794 - DNA, 532 bp, Pinus radiata
cctgggtgccttcgtcgctcacttcacaatcaagttgaaagtgaaatcaatcgatctgaaggtgaaggtgaaggtgaagcgtattctcattcgcctcacaccgccatggacattacagcacggcagatgttgcagttgattcgccaccatttgctggaagaggaagacgaaatggatgttcttgaggtagggggaaattatccattctcctcatcatcatcttcattatccttctctcccacagtgagctccgatttttcccacgccactgccagtggcccatgccaaaccagcgacagcacatcattatcagaagagaatgagagtgcacaaccctcttctgcttcttcttcttgtgtatccactgttttacgaagcgcagaggcggtaaatgtaaaggtaatgccacagccacagccacaggaggaggacagtcgagagaccatcaaagacaggcactacagaggagtgaggaagcggccatggggtaaattcgcagctgaaatcagggaccccgccacgaagggggcca

SEQ ID NO: 1795 - DNA, 502 bp, Pinus radiata
tgcataccatcattgtaatggaggtgaaaggaataggagtgggattcttattaagcaatggaaggttacgctgcgaataacgatgcagaactttgagcaaaacccttcaagtggaacagaagttgttctatttcgatctcaaggaaaacccccgaggtcaataccttaaaatctctgagaagacctccggctcacggtctacaataattgtgcccattggtggagttgcatggttcctcgatctctttaattattatgtcgacggagatgacgaggaagttttgagcaaggaattgcagctggatgccaaggtattttatttcgatgttggggtgaataaaaggggtcggttcttgaagatttctgaagcatctacatcctacagtcgcagcacaatcattgtacctgtaggaaacacaagaaaagatggttgggcagcatttagaaatattttaggagagataaatgaagcttccaacaagcttctggcccatccgaacat

SEQ ID NO: 1796 - DNA, 476 bp, Pinus radiata
  misc_feature (1)...(476): n = A,T,C or G
cgaaactcgaatcgatatgctttgtggccggttcaaatatttgagcnggcttagcttctctggttcagaaatggcggactaaagtaatagtgtgccccgaggtctggtgttcgaatctcgttggcgtgaaaggtcaaatttttctctcgagtttcattgattctgaaaaactggcatagctatggcgatgagcaatgggagattgtgtgaagatttggataggattaaggggccgtggagccccgaggaggacgcgtcgctgcagaggcttgttcagaaatacgggccgaggaactggaccctgataagtaaaggaatcccggggcgatccgggaaatcgtgcaggctacggtggtgcaatcagctgagccctcaggtggagcacagaccttttaccccgtccgaggatgctgctattctgcaggcccacgcgcagcacggcaacaaatgggcaacaattgcccgagccctccccg

SEQ ID NO: 1797 - DNA, 509 bp, Pinus radiata
ttccagaccttttgcatcttcattattcttccgcctgtgaaaagatggggagatctccgtgctgtgagaaggctcatactaacaaaggggcctggactaaacaagaagatgaccgccttatcgctcacattcgagcccacggcgaagggggctggcgttctcttcccaaggccgcagggctgctgagatgcggcaagagctgcagactgcgatggataaactacctgcgtcccgatctgaagcgtggaagcttcaccgaagaagaagacgagctcatcatcaaactccactccttcgttggcaacaagtggtctttaattgcagggagattgcccggacggacggacaacgagataaagaactactggaacacacacatcaaaagaaaattgctgagcaagggactcgacccccaaacccatcgtccactaggccagccaaacaatacccccgtcactcggcctgttcccgagcacgaaattccggcattccagaaccctgcaacgccg

SEQ ID NO: 1798 - DNA, 247 bp, Pinus radiata
ccagactatcatcgctgcctctatggcatctcctctaacattatcaaatggccactatccgtttcagtccgagttcaaggggtccgtggttcgaatcccgcagagggcattttccttcgcgcctgcaagcccgggcgctgaccgtcgtcgcagaggccaagaaggccgttgccgtgctcaaagggaattcacaggtcgagggtgttgtcagtctctcgcaggaagacagcggtcccacaacagtgaa

SEQ ID NO: 1799 - DNA, 147 bp, Pinus radiata
tcattattcttccgcctgtgaaaagatgggagatctccgtgctgtgagaaggctcatactaacaaaggggcctggactaaacaagaagatgaccgccttatcgctcacattcgagccccggggaaaggggctggcgttctcttccca

SEQ ID NO: 1800 - DNA, 361 bp, Pinus radiata
cttcagtttgcattgaagaccaataaataattattgtgaagcagcagcgttttaatcagagatccagcaagaagaggaccaggaaaaatcatttgcagaacaagaagataatccaagatgtcaagcacacgcagccctcagtgtgggtgcggagaaacttgcgcttgcgccgattgcaagagtggagttgtgagtattgcgcctccatccgaccaaacaagtgggggacatgcatattgcaagtgtggagaacactgcaactgcaatccatgtaactgttcaaagattgacgagactgttagtgggaaatccttctgtaaatgtggagagaattgcgcctgtgaaacatgcacctgcagca

SEQ ID NO: 1801 - DNA, 359 bp, Pinus radiata
cgtggctgttcccaggagaggagagcctcagctgtctcgatctgcgttaaggggttacagaagaagaatttcgaagatggttagatcttcttgctattcaaagcaaggtcataggcgtgggatttggacccctatggaggatatgattctctctgaatacattcgaattcatggcagtgatggatggaaaaatatcgctaaacgagcaggtcttaaacgatgtggaaagagttgcagattacgttggttgaactatcttcgccccgacattaaacgtggtaacatttctcctgatgaggaggacctcattattaggttgcatggccttcttggcaatcgatggtctttgatagcaggac

SEQ ID NO: 1802 - DNA, 475 bp, Pinus radiata
agcgtctatagaagagcagggactaattccatctttctccatttctatttctcttcccaatcaaaaccatggcgtctaacggacagcttaatgcaggcactggctgtgttggtgatctgaccaatgttggagatcgacgattggaggggaaggttgcaatagtaacgggcggggcagcgggcataggagaagccattgttcagttgttcattaagcatggagccaaagtcataatcgccgacgttgcggagaaagctggcagaaagcttgagcaatccctttcacccgctgtggcaacttacgtgcactgcgatgtgagcaaagaagaggatgtaagcgcagcagtggatgtggccatcgacaagtatggtcaactggacattatgtataacaacgctggaactaacgacagcgttttggtgaagagcgtaacagagtatgatatggagcaattcgatcgagtgataaatgtaaa

SEQ ID NO: 1803 - DNA, 382 bp, Pinus radiata
attactttcagttttgcaagctggagatgactttgactgtccagtatgtttatcaccaccatcagaggctatcataaccatctgttcacatgtgttctgtaagaagtgcattgagaagacattgaaacatctaaagccacagtgtccattgtgccgtaagcagcttacagcatctgatctttttagttcaccaaaggttgctgacgagaatgaagttacatcagaaaaagtagccaaaactggttcaaaaattaatgcattaatagctctattgaaagagtcccaggatcatgatccaactacaaaatctgttgtattttcacaatttcgaaaaatgctggatctcttgcatgaacctttgaaaagtcaggcttctagtttg

SEQ ID NO: 1804 - DNA, 533 bp, Pinus radiata
atcgcctggaatttgtcttctgcaagataatattcaattaatctattgtcgaaggaaatttgagccgtataagaggataatcaaaagaagccggttgatttctccgggattaaaggatggatcaagaaaactggaacatcggagctgatggcactggctgccaagctccagaagggcacactctttgcgccaataactgcggcttttttggcagttcggcaacgagaaacctgtgttcgaaatgttacagggatctgattatgaaggaggcccaagcctcatctgcaatggccgccgttgagaagtcatttgccgcgggttctccgatggaggaggaggcccctctttccaagccagatgttttcgtcgaacaaagccgtgcaccgatctccccagccgtagtccaagcctcgtcagttcacttggctgatataggttcatcttcttctccacaacctcctgccgaaactcctaaccggtgcttctcctgcaggaaacgagtcggtctgaccggcttcaaatgtcggtgcgga

SEQ ID NO: 1805 - DNA, 549 bp, Pinus radiata
gagtgaggaagctgtagatgaaaagcgtgtaaatctgcagcaagcagaaggtccggaggagcccagggttgtaactgcgagcacattagaatccccaaaaagtacagaacaggagaatagtcttgaggttgaggaagctggtgacaaaaagctccaggcacatgtgaatgaaacgtctttgaatgcagatcaagaaaattccatcaaggagcttcacaacaagtatcctcgttactcggaagaacttttgacgaatatgctggctgatcaggatggcgatttgaaagagctagaagcactcttaaaaacattacaacgccaagagattagagctgctaatcgaaaaatgtcaggtccatcatcttcaaaggcaacagataacacagatgtttccacggaatcaccaccctcaaagctacagaatgcctctaagggcaaaaccagaggaaagagcgccaagaagagagaaagggatacaactttatccgtaggtagagttcacaaaacgcgtcgaaaaactgcttccgacgatgtgaaggccgcttctaa

SEQ ID NO: 1806 - DNA, 397 bp, Pinus radiata
gttttgggctctcatttgggagttacattcaaccaagctcatcacatggcgtccgagaaggaagctgctcttgctgccacaccaccagaagatgataaacctacaatatttgacaaaatactgcagaaggagattcccagtacagtggtttacgaggatgagaaggtacttgcattcagggatatcgcaccccaagcacctactcacatcattatcatccccaaagtaagggatggcttgactggcctatctaaggcagaagagaggcatgaggatattctaggtcacctgctatacactgcaaaagttattgcaaagcaggaaggtttatctgatggcttcagaattgtcattaacgatggtcctactggatgccaatctgtgtaccatttacata

SEQ ID NO: 1807 - DNA, 242 bp, Pinus radiata
caagatgggcagatcttcttgctgctcaaaagaagggctcaaccgtggggcctggaccaaaagggaggatatgattctctccgaatacattcgaattcatggcgatggcggatggagaaatatgcccaaaagagcaggtcttaaacggtgtggaaagagctgcagattacgatggctgaactatcttcgccccgacattaaacgtggaaacatttcccctgatgaggaggaactcataattc

SEQ ID NO: 1808 - DNA, 364 bp, Pinus radiata
  misc_feature (1)...(364): n = A,T,C or G
caagagtaaacccgaaggaatagaaggggaaggaggcatcggcagcgttgttcctcctcctctcctctcctgcatttctcaaactcaaatacctctcctctcacaatcatggaaggcggagtcgtctttgaatctgtgcaaaacccactggatcgcctgaacactggaaatatggaccatggttgtgcccattacaggagacgatgtcggattcgggccccttgttgcaatgagatctatgattntaggcactgtcacaatgaagccatgagccatctaaaggaccccttgctgcgccatgagctcccaagatacaaagttgaacgggttatttgttctctctgtgacactgagcaaaatgtca

SEQ ID NO: 1809 - DNA, 265 bp, Pinus radiata
cttaagtttcagatgcctggtaattcttcttttccaactggaaacgctgccccatcaactaaaaatctttactattcatttgacttgggagttgtacatttcttgtatatgtccactgaaactaattttttagatggaagtgatcaatatgctttcatagagcaagatttgaaaaaggttgatagaaacaagactccatttgtagtatttcaaggtcaccgtcccatgtatacgactaactatgaactaaaagatgcgcctctaa

SEQ ID NO: 1810 - DNA, 346 bp, Pinus radiata
cttgaatcgatcttgcctgcttgtgccggagcgcgcacagtgtgtggtttgttctcgtttttcatcttaaagcggcggttgcaggaattgattgtgtgaggggacgagatgtgtgcagaggtaagtcagagtgccatggccgtgcacactatgcagatggcgagaatggaaatgaagcgtgaaataggagtctgtgagcaggaagcttcgtcggccgtgaaggaaacgcatttcagaggcgtgaggaaaaggccgtgggggagattcgcagcggaaattagagatcccttgaagaaaaccagagtctggctaggcacttttgacactgccgaagaagctgccgagc

SEQ ID NO: 1811 - DNA, 353 bp, Pinus radiata
  misc_feature (1)...(353): n = A,T,C or G
cgaaactcgaatcgatatgctttgtggccggttcaaatatttgagctggcttagcttctctggttcagaaatggcggactaaagtaatagtgtgccccgaggtctggtgttcgaatctcgttggcgtgaaaggtcaaatttttctctcgagtttcattgattctgaaaaactggcatagctatggcgatgagcaatgggagattgtgtgaagatttggataggattaaggggccgtggagccccgaggaggacgcgtcgctgcagaggcttgttcagaaatacgggccgaggaactggaccctgataagtaaaggaatcccggggcgatccgggaaatcgtgcnagcttcggg

SEQ ID NO: 1812 - DNA, 185 bp, Pinus radiata
tcttgctgccacaccaccagaagatgataaacctacaatatttgacaaaatactgcagaaggagattcccagtacagtggtttacgaggatgagaaggtacttgcattcagggatatcgcaccccaacacctactcacatcattatcatccccaaagtaagggatggcttgactggcctatctaa

SEQ ID NO: 1813 - DNA, 337 bp, Pinus radiata
caataaatggccgaatgaattaatcaacgatgaaatgaattaatgaataagctattggatctaggaagggttttgaggctgaaagttttgggctctcatttgggagttacattcaaccaagctcatcatatggcgtccgagaaggaagctgctcttgctgccacaccaccagaagatgataaacctacaatatttgacaaaatactgcagaaggagattcccagtacagtggtttacgaggatgagaaggtacttgcattcagggatatcgcaccccaacacctactcacatcattatcatccccaaagtaagggatggcttgactggcctatctaa

SEQ ID NO: 1814 - DNA, 340 bp, Pinus radiata
gttcaagggagacgggatattcagagtccgatcgccgccatggccgtagacaccatacagatggcgagagtgggtgtaaaaatgaagatcggaggaggcggctgcgaggaagaggcgtcctcggctgtgaaggaaacgcatttcagaggagtgaggaaaaggccgtgggggagattcgctgccgagatcagagatcccttgaagaaaaccagagtctggctgggcacttttgacactgcagaggaggccgcccgagcctacgataacgctgccagaaattccgcggggccaaggcgaaaactaattttcttctgtctccccacaatgacattagcaccaa

SEQ ID NO: 1815 - DNA, 433 bp, Pinus radiata
ccgctatcctttccattacatcccacgttaggtcacggtttcgaacccttgcacggccattcttctgttaagatggtgagatctccctgctgcgacaaggttcataccaataacaaaggcgcctggaccaaagaagaagacgagcgtctcatagcacacattgaagcccacggcgagggctcatggcgttctcttcccaaggccgcagggctgctgcgatgtgggaagagctgcaggttgcgatggataaactacctgcgtcctgatctgaaacgcggaagcttttcagaagaagaagacgatctcatcatcaaactccactccctcctcggcaacaagtggtcgcttattgcagggagattgccagggcgaacggacaaccgaaaataaaaaattactggaacacgcacatgaaaaggaaattgttgagcag

SEQ ID NO: 1816 - DNA, 225 bp, Pinus radiata
atcacagtcggcctctgatcaaagaagaagccgaatcaaggtgataattctgcaaattctgcagatgtagaaactcttcttcctcaggttgatgaaacagcttctgctgatctgacagtgttcccaggttttgttaccccttatgtaccatacgggttccccatatggcacacttttagacccacaataactcaaacttccaatgtttataagccaacagctgta

SEQ ID NO: 1817 - DNA, 337 bp, Pinus radiata; identical to SEQ ID NO: 475

SEQ ID NO: 1818 - DNA, 390 bp, Pinus radiata
gtttgttcgaacgatgaaaaccagctaaaacaaagcgcagggattggcaggattcgagcagtggtccttggggcggagttgatagaagaagaagaaacctaccatatacacatacatatattatatacatagacacatgggggctccgaagcagaaatggacttccgaagaggagggagctctcaaagcaggtgttgagaagtatggcactggcaagtggcggaccattcagaaggaccctgagtttggacactgcctcgccgctcgttccaatgtggatttgaaggataagtggcgcaatatgagtgtgagtgctagtggccaaggttcaagggataaggtaaagactccaagagtaaaagctattgcctctctgccttattcatcaag

SEQ ID NO: 1819 - DNA, 367 bp, Pinus radiata
attcaaaatgggaaagaagttggagctgaaacgcatccaaaaccctaatagttcacgtgattccttctccaaatgcaagaggggactgctaaagaaatcggtcaagctctttgttctctgtgatgctgaagtttccctcatcattttatctgaaaccgccaagatttacgagtttgcaagcaacaagtcgtgactagctcttgtgaattcttctgatcaagttagagatccatatactgatatataaaagcatactttcacattgcaattggagcagatctagatgcagaagtgcaaccttattatacctaaaggccatcagctgcaaatcaagacccattttctatcttttgagatcgtgatacag

SEQ ID NO: 1820 - DNA, 487 bp, Pinus radiata; identical to SEQ ID NO: 534

SEQ ID NO: 1821 - DNA, 319 bp, Pinus radiata
tttaagcatttcattgagtcttaggtcacggtttccaatcctggcaggtctcattattctgtctctctggcaagatggggagaactccctgctgtgaaaaaggtcatacaaacaaaggcgcgtggaccaaagaagaggacgatcgcctcatcgctcacattcgagcccacggcgaaggccgctggcgttcgcttcccaaggccgcagggctgatgcgatgcgggaagagttgcaggctccgatggataaactacttgcgtccagtctcaagcgtggaaacttctcagaagaagaagatgagttcatcatcaaactccac

SEQ ID NO: 1822 - DNA, 320 bp, Pinus radiata; identical to SEQ ID NO: 507

SEQ ID NO: 1823 - DNA, 338 bp, Pinus radiata
gtcgagctccttgctgcgagaaaacccatacaaacaaaggcgcctggagtaaagatgaagatgaagcactcgttgcatatattcaagcccatggagaaggcagttggcgttcccttcccaaggccgctgggttgcagcggtgtggcaaaagctgcaggcttagatggataaattatctccgtcctgacctcaaacggggcaatttcagcccagaagaagatgagatcattatcaaacttcattctatgttgggtaacaagtggtctttgatcgcaagcaaattgccagggcgaacagataatgagataaagaattactggaacactcacattaagaga

SEQ ID NO: 1824 - DNA, 332 bp, Pinus radiata
gccgaggtgaggaggcattacgagcttcttgttgaggatgtgactgtgattgagtctggccgggttgctttgcctgcttattctgaaaattcgtatacaccgcccgaattgatgtcagatcagttgggcgatctcacaaaacagcaggcggtttctgtgaaggctccctcggccaaggcatccgaacaggagcgcaaaaagggcgtgccctggactgaagaagagcacagactcttcttgatgggattgaataaatatggcaaaggtgattggagaagcatatcaagaaactttgtggtctcacggacacctactcaagttgcaagccacgc

SEQ ID NO: 1825 - DNA, 301 bp, Pinus radiata
accgtcgagagagcttcatatctaaccaataataacacctgtatggcttcatagcttcacagcaacagggcaccatgggccgagctccttgctgggataaaatgggagtaaagaaaggcgcctggactctagacgaagataaaatactcgtcgattacattaccaaacatggccatggcaactggcgcgcactgcccaagcaagcagggctcctgcgatgtggaaagagttgtcgcctgcggtggacgaactacctgatacccgacatcaaaagagggaattttattccagaagaggaata

SEQ ID NO: 1826 - DNA, 498 bp, Pinus radiata
tttgcatccaattcttcctgtatcatctaattgctcagtctagcaattacgcaatctcggtccccagtcatgtctgacgaagaggttaatgcaactgctgcctctgtgggcaatctgaccttgctgctgcatgcatctcagcgacgattggaaggcaaggtcgcaataataacgggcggagcatctggcataggagaaggcatcgttcggctcttcacaaagcacggagccagagtcataatcgcagacattgcagatgaaaccggcaaaattctggccgaatccctttcgcctccggccacttacgtgcgctgcgatgtgagcaaagagcaagacgtcagcgctgcggtggatttggccatggagaagtacgcgcagctggatatcatgtttaacaacgcaggaatcgtcgatacggttaatgtttcaaggggagtggcagagtacgagatggagcagttcgaccgagttatgagcgtcaacgtcagaggggtgatg

SEQ ID NO: 1827 - DNA, 551 bp, Pinus radiata
cgtggctcttcccggcagacctagtaagccgactactgtaaatttattcttttagggttacagaagaagaaaatacaagatgggcagatctccttgctgctcaaaagaagggctcaaccgtggggcctggaccaaaagggaggatatgattctctccgaatacattcgaattcatggcgatggcggatggagaaatatgcccaaaagagcaggtcttaaacggtgtggaaagagctgcagattacgatggctgaactatcttcgccccgacattaaacgtggaaacatttcccctgatgaggaggaactcataattcggctccatcgccttcttggcaatcgatggtcgcttatagcaggaagattaccaggtcgaacagacaacgaaatcaagaactactggaacactcatatgagcaagaagctgcttccattgaacgaatctgaacccaagactttgcctgtccccaagaggaggtcgcaatctccttctcccctgcaaaatcgagtctttaaagccaaccctgtgaaaataacaacggtggtcagtc

SEQ ID NO: 1828 - DNA, 256 bp, Pinus radiata
ctgaaattcggatgccgaaatcccatgagaagatatggctgggatcctataataccgccgagcaagccgcccgtgcttacgacgccgctgtgtattgtctgagaggacccgccgccaaactcaattttccagaaaccgtgccgggtattccgtctgcgtcttccctttcccggcagcaaattcagcatgcagccaccagatatgccttgggtgaaatccctttgatttcgccctctctgcaaaatattgactcgag

SEQ ID NO: 1829 - DNA, 372 bp, Pinus radiata
gcagattctcaacagaattgggaaagttttgtgaatattgaagatggctcagtgccatgaaatcattgaaagtcgttgcagagacagccatggcgcatcagatctgaagctgtttgccatggccgcggttctggtgacgagcaccggaggagtatgtttgccggttctgtttgccagatattcccgagggctcaaattttacggcactcttctggtactggtgaaatgtttcgctgccggagtgattctgtccacaggatttgtccacgtcatgccggaagccttccgcgctctggaaagcgactgcctgccggatcatccatggcaccagttcccgttcgccggactcgtggccatggccggggcaatcct

SEQ ID NO: 1830 - DNA, 486 bp, Pinus radiata
agcgggtggtgatttagccgagggcgaagaggaggacgaagaagggcttcgtaacaaacgtggcgattgatcctaccttagcctgaaaatgctgtcaggaggctacgcaaccagatccgacactactactgtcaacaacggatccgctaatggcccaataggaagtgctcccccaagaattaactcgatacaaaataataatccaggagctgtcaggcctggctggggaaccatgccccttcacatgaatccttatcatccccaatcaatgcctcttccgccccccaatggtatgcagggtcagcttgtttgcagtggatgtagaactcttcttgtttatccgcaaggtgcaccaaatgtttgctgtgcagtatgcaacacagtcactccagttccacctcctgggacagaaatggctcagctaatctgtggacgttgtcgtacattgctaatgtatgttcgtggagcaactagtgttcagtgctc

SEQ ID NO: 1831 - DNA, 330 bp, Pinus radiata
gtttttccgcaggaagttttgatttgagtaggaaatcctttggcctcctggagctttgatttgctcaggaaaccctagcccttcggttcctgaagctttgcttttcgtaggaaaccctttggcaccggtaggcgatggctcccagcaacaacagaagagacgacaatggagcacgaggagttcacttcaggggcgtcaggaagaggccctggggtcgatacgcggcggagattagggatccatggaaaaaagttcgtctttggctcggcacctttgacacggccgaggaagccgcccgggcttatgacactgccgctatctccctcagag

SEQ ID NO: 1832 - DNA, 413 bp, Pinus radiata; identical to SEQ ID NO: 584

SEQ ID NO: 1833 - DNA, 260 bp, Pinus radiata; identical to SEQ ID NO: 351

SEQ ID NO: 1834 - DNA, 338 bp, Pinus radiata
aattgaatcggccatggttttgtatgaattgttacatgtacagcagattcagcaaatacagcagcagcagtttcaattgcaacaacaacaaatagcagcagcggcttcaatccaccatatgggtcgaaaccctctgggtcccagagctcagcccatgaaacttcatggcagcagcctatcaaagccggctaagctttacagaggcgtgaggcagcgccactggggtaaatgggttgcagagatcaggttacccagaaacagaaccaggttatggctggggacttttgatactgcagaggaagcggccatggcttatgacaaggctgcttacaggctga

SEQ ID NO: 1835 - DNA, 240 bp, Pinus radiata
gcttattggaatgcctgacactaactatggaagcgaacagacaaatgcttgcaaaaaacagaaaagaatacgttccaaggattcaggagaagatggtgaagatagacagagataacatcctttcattgttactgagcccggtgaacttgcaagagggaaaaagaatgggttagactatctctttgatctttatgaacagtgcgggaaatttctgctggatgtgcaacatattgcgaagga

SEQ ID NO: 1836 - DNA, 349 bp, Pinus radiata
gataaatccagatgaggttttagcagtcaactttgcattccaactgcatcacatgcccgatgaaagtgtgtctacaaagaacctacgtgaccggcttctaaggatggtgaagtctctcaaccctaaagtggtcacagttgtagaacaagaggttaacactaatactgcacctttcttaccccggttcatggaagcattaaactattactcatcagtgtttgagtctctagatgctacaattccaagggatagtagagatcgtatgaatgttgaaaaacagtgccttgcccgagacatagtgaacataattgctttgtgagggggaagaaagggttgagaggtatgaagt

SEQ ID NO: 1837 - DNA, 457 bp, Pinus radiata
gaaaagtatgttcaagttttttccattcaaacatatccttgttggagggattcggaaccgtctccggtcgtcttcaaccagtctgaccccaactcgcagtctcttgtactctcaaagtataaatttttcaagaatggctaattcgaatcgaggatgcttcatatgcggttctgaggatcatcgaaaagcggactgtcccacacccgacaaacttacctgttatcagtgcggtggagtgggccatcagtctcgggactgctcttcctccgagaagcgcaaaacctgctacaaatgtggtgaagagggccatatctctcgcgactgttccaatgcgccaacctctgagtattccggtggtaattccggcaccgaatgttataaatgtggtaaattgggtcatatctctcgctcctgtccgacaaatgagtcaactgctgactatgctagggctcctagc

SEQ ID NO: 1838 - DNA, 395 bp, Pinus radiata
ctgaaatatcgttaaattcactcttttggtctcagttactgcgtcgccaatatggaaaatctccccaatcagcaacctgaccttgaaattgctcaaacacacgaggatcccgggtcccgccaatttaagggaattcgactgcgaaaatggggaaggtgggtatcggaaatccggatacccaaatctcgagagaaaatatggctgggctcttacacgactcccgagcaggctgcccgtgcttacgacgccgcagtgtattgtctgaaagggcccaacgccaaattcaactttccggaaaccgtgcacgacattccgtctgtgacttctgtttcccgtcaggaaattcagcacgcctccctcaaatatgccttgggccagccccctccgagtttgca

SEQ ID NO: 1839 - DNA, 395 bp, Pinus radiata
gctaacacagcccttatatatcatcatgggaagcttcttgcacttcaagaggcagataaaccttatgcacttagagtccttgaggatggtgatttgcaaactcttgggctaatggattatgataataaattagcacactccttcactgcacatccaaaggttgaccctgttacaggggagatgtttacatttggttaccaacacaagcctccctatttaacttaccgggttgttacaaaggagggaataatgcttgatccagttcctataacacttcccaaacctgtcatgatgcatgactttgccataactgataactatgcaatcttcatggatcttcctctctatttttctccaaaggatatggtaaaaggtggactcatcatgtcttatga

SEQ ID NO: 1840 - DNA, 468 bp, Pinus radiata
ctcatttcagtgattcactcactgaaattattgttagaatcactgttttggccccagagcttctgcgtcgccaaatatggagatacgcctccagcaggaaaacgaccaggacattgctccgccacacgaagatcgcgtgtcccgccaatttaaaggagtccgaccgcgtaaatgggggatatgggtatcggaaatccggatgccgagatctcgacagaaaatatggctgggctcgtacaaaaagcccgagcaggccgcccgcgcctacgacgccgcagtgtattgtctgagagggtcgaacgccaagttcaatttccccaattctgtgcccgacattccgtctgcgtcttctctttcccgccagcagattcaactcgctgccgccaaatatgcgttggatcagtccccttcaagcccgccgtctctgaacaataataaagaggaacccgcgtcaccgtcgcagtcgtc

SEQ ID NO: 1841 - DNA, 378 bp, Pinus radiata
aaacaatacagtcgacattgttgcagcatctagagctattcgtgaaccacgtgtagtggtacaaacaaccagtgaaattgacatccttgatgatggatatcgatggcgcaagtatgggcagaaggtggtgaaaggaaatccaaatccaaggagttactataaatgcacaaatgctggatgtccagtgaggaaacatgtggaaagagcatcacatgatccaaaagcggtgatcacaacatatgaaggaaagcataaccatgatgtgcctgctgccagaaacagcagccatgataatgctgcaaaagggaatggggcagctcctctagcaatgcagaataatgtcccagcgcctatgaatgctataccacgacctgttcc

SEQ ID NO: 1842 - DNA, 382 bp, Pinus radiata; identical to SEQ ID NO: 455

SEQ ID NO: 1843 - DNA, 314 bp, Pinus radiata
catagaaagagctttatgtgtcctgaatttgaaccctctcctcgttttaaagaatccgagctttgcaaacacgccttgagctagactccggaataccccagcaacaatccgacatggctaaatcctcgcaaaaccagaacccccgcaacagacgcgaaaaccgcttacggaagtcacggcagttcaagggaatacgaatgagaaaatgggggaaatgggtgtcggaaattcgaatgcccaattccactgggagaatttggctaggctcttatgacacgccggaaatggctgcccgcgcctacgattttgcccgg

SEQ ID NO: 1844 - DNA, 384 bp, Pinus radiata
ccggttcctagttcgaatccttgccctaacgcagtcccgtgttttaagactcaatctttagtgactcccccgcaacatggttaagcccttgccaaaacagagcagcccgagcggatcggaaaactgccaaataaagtcgcggcagttcaaaggaatccgactgagaaaatgggggaaatgggtgtcggaaattagaatgccgaattccagggccaaaatctggctgggctcctacgactccccggaaaaagctgcccgcgcctacgactttgcgttgtactgtctaagagggtcgaaggccacattcaattttcccgactccccgccggaaattccatgcgcctctgacctgtcgccgccgcaaattcaagccgccgcggccag

SEQ ID NO: 1845 - DNA, 171 bp, Pinus radiata
acatcccgtcttcactttgttgatcaacaattacgacaacagcgagctcttcagcagctaggaatgatacagcagcatgcctggagaccacaaagagggcttccagagagggccgtttctattctccgggcttggctatttgagcatttccttcatccgtaccccaaaaat

SEQ ID NO: 1846 - DNA, 436 bp, Pinus radiata
agattgatcaaacacaaataccgtaaaatcgcagcgaagatccaaaattccaccatggggactgtggcggaagatggcagcaagggttacacggccgtaaatccccatcccaaaaagggcgtcgcctcgtggctggtggacatggtggagaaactggtggttgaaacttctgcgttgtatagttcgaagaagcctctgcattttcttttggggaacttcgctccagtctcggaaactgcccccaaatcgcacctgcatgttgttgggcaacttcctagttgcttggatggagagttcgtgcgcgttggtcccaatccgaaattcgcaccggtagctggctatcactggtttgatggagatggaatgatccatggtctgagaattaaagatggtaaagccacatatgtgtcacgttatgtgaagacatcacgcttga

SEQ ID NO: 1847 - DNA, 303 bp, Pinus radiata
ggaggcgagccattctttgttccccgctcctcggatcctgcggcgccggaagacgatggctacatcctcacattcatgcacaacgaggagacctcgaagtcggagcttcttattttggacgccagatctccgaccctggaacccgtggcaacggtaaagctgccgtccagagtcccatacggattccacggcacattcatcacttctgaagagcttgccaagcaggtgccgtgaagacgcgctgtcttccgcccttcttgctttcttgattaccctacaacacctggttctgtactttcttta

SEQ ID NO: 1848 - DNA, 551 bp, Pinus radiata
gcgatttcgagtgctgtaagcaggcaacgacgcctgttttgctttagagtttaacagaaaagaagaatgtgtggaggtgctatcatctcggactttataataccccctgcgagccgaggccgccgggtgactgccagggatatatggcccgattttgataagttctctgagtttattaatggaggtgctgcggtggagtcctttgatgtcagcgttgatgtcgatgacgacgaggaggattccgacgatgacgagttcctcgattttgaggagagctatcagaacaagaagaagaagcagcaacagccgatatcccccaccaagggtttcgagcttcctttagctcggggtcttgatggaccggcggccaagagcgcggtgagaaagaggaagaatttgttcagagggatcaggcaacgtccatgggggaaatgggctgcagagatcagggatcccagaaaaggcgctagggtttggctgggtacctttaatacggcggaggaagctgctcgggcttatgatgcagctgcacgaaagatcagaggtaagaa

SEQ ID NO: 1849 - DNA, 527 bp, Pinus radiata
gaacagtcgagcctcgttgcaccctcctcagtcaccacaaacagcactgcagcgaaaggacaagggcctgctgatactgagtctcaaccagacctaactgctgccgagaagccttcaatggagcccaagaaaccgccaagaaagaaaggtcagaaacgaaacagggagcccagatttgcattcatgaccaaaagtgatgtggatcatttggaagatggctatagatggcgcaaatatggccaaaaggctgtcaaaaacagccctttccccaggagttactatcgttgcacaaatggaaaatgctcagtgaagaagagagtggagcgttcgtcagaagatccaggaattgtgattacgacatatgaaggacagcattctcatccaagcccggccatattgcgtgggtcagcagaatcccaatcccacttttcagatcaaagattgaattctcccttcactcaaacgccattgatcagattccctccccacccaatgatgatgagtagtactaaccaggtcccagctgc

SEQ ID NO: 1850 - DNA, 226 bp, Pinus radiata
gagagaaggtggaagtacagcaatagaaagtgacttgaaaagtgaaaatcttgaagaaaaagaagcgaaggcaagtgaaaatgaagataagatgctgaaaaaaccagacaaattgttaccttgtcctcgctgtgacagtttagataccaaattctgctattacaataattacaatgtgaaccagcctaggcatttctgtaaaaattgccagagatattggactgct

SEQ ID NO: 1851 - DNA, 236 bp, Pinus radiata
atggccggagaccacgcttgccccgtctgccaagcgacttttactcgcccgcaacatgtcgcacgacacatgcgctcccacaccggcgaccgcccgtacaagtgctccatctgcaccgactcgtttggccgcagcgacctcctgaagcgacatgagaagaagatgcactcaaacgggcagagcgcagcgagcacgcccactgggccagggcagaacaaatttgatagccagtttac

SEQ ID NO: 1852 - DNA, 455 bp, Pinus radiata
ccacaacgaataaatgcaaatgctgttctggatagctgaacccaccaactcatcagcataaatttctccagcagaaatccagcctcccactcgcgcgcataaatttcttcaacggaaatccagccggccgctaaattctctgcactgacaaaagcccacaggctaacagattccgacatggatcgccccattccctggccatctgcatacacagaaatctagactttgaaaatctttctaaattctgtatggagccctgaactgtaggtgcagggttcgattaccgctatggatgaggccgcgcctgccaaggctcctctcccctgtgactactgtggcgaagcgaatgcagttctctactgccgagctgactccgccaagctctgcctgccatgtgaccaccacgtccattctgccaatgccctgtccaagaagcatgtccgatcccagctctg

SEQ ID NO: 1853 - DNA, 324 bp, Pinus radiata
cttgaatgttgttgcatgtgagggatcagaaagattggaaaggccagaaacttacaaacagtggcagggacggactcagcgtgctggatttgtacagcttcctctggatcgtagtattctctctaaatccagggataaggtaaaaaccatttctatcataaggattttggagtggacgaagatggtaattggatgctattgggctggaagggaagaactattcatgctctgtctacgtggagaccttcgacatgatttggcgatggagaatttttctctctgcaaagagtaaggcatgatacatatttgtgattctgccaaggc

SEQ ID NO: 1854 - DNA, 316 bp, Pinus radiata
acgggctctccaacaattaggcatgattcagcagcatgcttggaggccacagagaggacttcccgagcgatctgtttctgtcttacgggcttggctatttgaacattttcttcatccgtatccaaaagatgcagacaaacatatgctcgcgagacagactgggcttaccagaaatcaggtctcaaattggtttataaatgcacgtgtacgcctctggaagcctatggtggaagagatgtatgtggaggaaacaaaggaggcagaagtagaccatggatcaaatgataaaacaggtaaggagagtggcgagaaaaaa

SEQ ID NO: 1855 - DNA, 393 bp, Pinus radiata
cggaaaatcacccccttgcgttgcgcaccatcgccccgacgtaccgaagtagcggacacggttccgtaatattgtacaggcgcgcgcccacccccacagcgacgacagacacacattctttaacgatccatctccttcttgacgaaacctccacccccaacgattgacgatgcccaaggcggacagccagagcggatcccgagattctacggtcggccccgctcaaggtacgctgaagcggaaccaggcgtgccaccaatgtaggaagcggaaactgaaatgcgacgccaaaagaccttgctcgacttgtgtgaggtcacacaaccacgccatcacccacgctggtccagacgctgttttgccgcccttcccagaatgtacctttgacgaagt

SEQ ID NO: 1856 - DNA, 359 bp, Pinus radiata; identical to SEQ ID NO: 563

SEQ ID NO: 1857 - DNA, 459 bp, Pinus radiata
ggaaggcaatgagagtgatctcctcaagggaatgaagaaggcaaggcgtgagagaggatcaacagcaaaggaacggattagtaaaatgcctccctgtgctgctggaaaacggagttctatctacagaggcgtcacaaggcatagatggacaggacgatatgaagctcatctttgggacaaaagtacttggaaccagaaccaaaataaaaagggcaagcaagtgtacctaggtgcctatgatgaggaggaggctgcagccagagcttatgaccttgccgctctgaaatattggggtcctggaactctcattaattttcctgttagtgactatgctagagatattgaagagatgcagagcatttcaagggaagatttcctggcttctctcagacggaaaagtagtgggttttcaaggggaatgtcaaaatacccgtggactggccaagcaatcacaaactg

SEQ ID NO: 1858 - DNA, 368 bp, Pinus radiata
  misc_feature (1)...(368): n = A,T,C or G
aaaaaggcgtcagaatggggtgagtctgtagtaagtacaagcgaaaacagtaatgacttggatcctcctacttattctgaaacctcttcccctgctcaaggatctgatcctcgggttttcccctgtaatttctgtcaaagnaaattctacagttctcaagcattaggaggtcatcaaaatgcccataagcgtgagagaactttggctagaagggcacagagaatggggtcttttgcacaaagatattcaagcatggcatcacttccactccacggttcctcggaaacaagttggacgcccagtcggtttttagggataaaagcacattctttgattcacaaacctttccctgaaggtgataacctgcc

SEQ ID NO: 1859 - DNA, 497 bp, Pinus radiata
ggcaagaccgtctggaagaggatgttacgggaagagagcaaaagcgttaccgtgtctgcgacccggagctttcggagcgaaccgtggtagtaatgggggcagacccgcacgaatccggagtccgtctcgtgcacacgctgatggcctgcgcagaagcggtgcagcgcggtaatttggccatcgcgcgggaaatggtgaaagaagtgagaattctggcttcagcacagggcggggcaatgagcaaggtcgccacatattttgccgaggctcttgcccggcgaatctatgggtttctccctcaggacaccttgcggttcaaccagaacgaccccttgtccgattttctgcaatttcatttctaccaaacctgcccctatctcaaattcgcgcacttcatagccaaccaggccattctggatgccttctccgggcaccaacaggttcatgtcatagatttcaatctgaaacaggggatccaatggccggccttgatacag

SEQ ID NO: 1860 - DNA, 254 bp, Pinus radiata
gagtaggaggcggcggcggaggcaagggaagcccgtacagaggcgtcaggatgagaaaatggggaaaatgggtttctgaagtgagggagccgaacaagcggtctcgcatatggctcggctcctattccactcccgaggccgctgccagggcctatgatactgccgttttctacctcagaggaccctccgcgactctcaatttccccgaggaagcacgtaaggagcagcagagcgacctcaggctttcgcagctc

SEQ ID NO: 1861 - DNA, 515 bp, Pinus radiata
catcttctccttacaaaagtagctcccctcttgactccaggcggtcttcccagtccataacgatacggattacacccacgcaccccatgtcttccacctcatcgtattcttctccctcccctgacacaccatcacagtctgccgctgtgcgcccgacatctacccgagacgattcttccgtcatggaacctccacgtaagcgagccagggctgatcttaacgctgaacagcgaagagaggccagggcccaccgtaatcgaattgccgctcaaaactctcgcgataaacgcaaggcgcaattcacttacatggagcagcgcgtggcacaactggaggaagagaaccaacgactacgagcaggcatgggcctctctcaattcacgccagccgacaacgacaagttcgtcagcctcgagagagaatcagtacaggcccgcgagaacagagagctcaaggagaggatcaagagtctagagagcgggtggtcggccgtcatcaaagcgttgcaggcctca

SEQ ID NO: 1862 - DNA, 532 bp, Pinus radiata
agtttgctgctctacacctgtggttgcaagcgtttggagcttcaagaggcaaggtttggtctgtgattaattcatggcggcggcggcgacgactacgttgggttgtgcgaaggtggatttgatacggctcatgcggctgcgagagcttacgacagggcagctatcaagtttcgaggagttgaagctgatataaattttactctcaccgactatcaagaagatttagaccagacgagcaagctctctaaagaagagtttgtgcatattctccgtcgtcaaagtactggtttctctcgtggaagttccaagtatagaggcgttaccctgcacaagtgtgggcgatgggaagccagaatgggtcaattcctaggaaaaaagtatatatatttgggattatttgacagtgaagaggaggctgcaagggcatatgataaggctgctatcaggtgcaatggaaaggaggcagtaacgaactttgatcctagcttatatgaaaaagaaattcttgaagaaagaagagagagtcagactt

SEQ ID NO: 1863 - DNA, 497 bp, Pinus radiata
  misc_feature (1)...(497): n = A,T,C or G
ggcacgagcncttctgattttttggccgagggttcgttgcagaaaggccaagggcaagtaggaggcgatagacctacttgaaaatggaggtgtctgcgaagaagcgaaaggccgaagaagcgaatggcgtggtcgatatagccgtggaagatgctcggaaaatgttggaacccttcacccgagagcaactattagatattctgcaggaggcggcgacgcagcacctggacgtattggagcaggtgcgcgccatcgcggacaaggatcctgcgcagagaaagctgttcgtccgtggccttggctgggatacaaatacagagtctctcaaggccctcttttcccagttcggggaactggaggaaggggtcgtcattatggacaagaacaccggtaagagtaagggttacggattcgttactttcaagcacatggacggtgctcttaatgccctaaaggagcccagcaagaagatcgacggccgcatgactgtcagtcag

SEQ ID NO: 1864 - DNA, 308 bp, Pinus radiata
tgcttagatggagtttacgtccgaaatggagcgaatccccggttcaaaccccgaggaggccaccatttatttgacggcgatggaatgatacatgccgtgacgctgcgacacgggaaggctagttacagttgccggttcacggagcccgaaaaggctcattagcgaggaacgggcggggcggcagttttacccgaagcccatcgggcaactccacggccacggacgggctggtgcgcctgctgctgcatggtgcccgggggctctgcgggactggtcaacaccgggaagggcatgggcgtggctaatac

SEQ ID NO: 1865 - DNA, 395 bp, Pinus radiata
aagcggtggcagattgttcacaatgatttcaagtggcgctctttcttctgcagcagagattttgaaggcatatcagctgctcttggttgctactcctttcaagaaaatatctcattttatgacttatcaaacggttcttaatgtagcagagggagaaacgaggttgcacattgttgatttcggaattctgtatggtttccaatggccttctctgattcaatgtctggcaaatcgtcctggtggtcctcccatgcttcgcataactggaatcgagtttccccaacctggatttagaccagcagagagaattgaagagactgggcgcagactggaagactatgcaaaatctttcggtgtgccctttgaataccaggctattgcaacaaagtgggaga

SEQ ID NO: 1866 - DNA, 340 bp, Pinus radiata
gttaacttgaaaattgaacacttctcacccagcagttctgatatggaaaaactggagatcgaagagttggggagtccccagggtgatgtaaaatctttgcttattgaatgtgctaaagctattgcagacggtcgtaatgcagataatttgattgcagggctgagacaagttgtaaatatatatggggatccattgcataggttagctgcatatatggtagaaggtcttgtagcaaggttgcatttctcaggaggacatatttacaaaaccctaaaatgcaaggagcctaccagttccgaactcctttcttacatgcatattctatatgaagtttgtccct

SEQ ID NO: 1867 - DNA, 398 bp, Pinus radiata
  misc_feature (1)...(398): n = A,T,C or G
cttttcaagaagtggaaaagggtgcaaagtggaaccctttccagaagctggcggccgcagttcttgatgcggcggaggacaccctggttcgtccgcttgagaagcaacgcccgttgcccaacacatccgacccaacggttcaactgtgcggcaacttcgcgccggtgccggaaacgcnagtnaagcatgacctggaggtcgagggccgggtaccggagtgcttagatggagtttacgtccgcaatggcgcnaatccccggttcaaaccccgcggcggccaccatttatttnacggcgatggaatgatacatgccgtgacgctgagacacgggaaggctagttacagttgccggttcacggagaccgaaaggctcgttagcgaggagcgggcggggcgg

SEQ ID NO: 1868 - DNA, 200 bp, Pinus radiata
aattgcaaatcttgacagttcaatcggtaaatcaatgaaaagcatctcagatttatcacccatgtgctaattctatgagtggtttttgtttggtgtaggagcgcactgcattctacttcggaaaaaaatatggatgcagagcactttcctgtaggtttctttaggtgggataagagaccagcaccagttgtagcggcagc

SEQ ID NO: 1869 - DNA, 286 bp, Pinus radiata
ggatagtgcagagcggctgaacgtggagaagcacttcttcgcagagaaaataatggggattgtagcttttgagggagccgaaagaaaaatcagactggaaggaagagatcagtggcgtattgtgatggaatcagcgggattcaaatttaccaatttaagtcattatgcaaggagccaagctcgaattcttctctataattattgtgaagcgtattctctagatgaatcgtcggggtttctctctttggcatggcaaaatcggcccctcctcaccgtcctcagcctg

SEQ ID NO: 1870 - DNA, 301 bp, Pinus radiata
  misc_feature (1)...(301): n = A,T,C or G
ctatacctccgcctcttgtcaatttcaggctctttcttcctgatttttcagacagtgtacagtcgcgatattcacacaaggccgccattatcatctatctttcaagaagcagtagaccaaacaagcaaaagcggaaaaactatgggaaagaagaagaggnaggcccccaaggtctggtgttattactgtgagcgcgagttcgntgatgaaaagatattggttcagcaccngaaggccaaacatttcaagtgccatgtctgccacaagaagttgtctacccgctggaggcatggccatccat

SEQ ID NO: 1871 - DNA, 301 bp, Pinus radiata; identical to SEQ ID NO: 461

SEQ ID NO: 1872 - DNA, 447 bp, Pinus radiata; identical to SEQ ID NO: 570

SEQ ID NO: 1873 - DNA, 311 bp, Pinus radiata
gaagatggcagcaagggttacaaggccgtaaatccccatcccaaaaagggcgtcgcctcgtggctggtggacatggtggagaaactggtggttgaaacttctgcgttgtatagttcgaagaagcctctgcattttcttttggggaacttcgctccagtctcggaaactgcccccaaatcgcacctgcctgttgttgggcaacttcctagttgcttggatggagagttcgtgcgcgttggtcccaatccgaaattcgcaccggtagctggctatcactggtttgatggagatggaatgatccatggtctcag

SEQ ID NO: 1874 - DNA, 383 bp, Pinus radiata; identical to SEQ ID NO: 401

SEQ ID NO: 1875 - DNA, 235 bp, Pinus radiata
agagattcaggggtgtgaggaggagatcgtgggggaaatgggtagcggagatcaggatgctccgatgccgatcccgcgtatggttgggatcctaccacactgcagaacaggcagctcgtgcctatgatgctgcctctttctgcctacgaggtcctgctgctttcctcaacttccctgaatctccacctgctcagtttctcccatatcccctgcgccctcttcatgatattcatct

SEQ ID NO: 1876 - DNA, 416 bp, Pinus radiata
gattgtatgagatatcagaaaataaaactgattttaattctgcaggcatctcagaaaaacaaaactggctttacttctacaggcatctcagaaaataaaactggttttacttctgcacagatgtcagaataacaaaactcgttttacttttgcagacatctcagacaataaaactggttggttttagtacttgcccagacatctgagaaaaacaaaaccggttttacttctgccgccggtaaggttttacaagcttgaattcaaactttataatcgggcgctgtttatatgtccaacggaaaatgtgaggtcctacacacgctgacgcgcgagctcgtcgccagttataaacgtaccatggaagccgtagggcacccgggagggcagtttgacggaggccacgacgtcgaggcccg

SEQ ID NO: 1877 - DNA, 320 bp, Pinus radiata
  misc_feature (1)...(320): n = A,T,C or G
gcacaatgttgaagggtgggatagagggtctnatgttgatcacaaagagtttctcagagggattggagggtggagaatgagtatgccaaagctctgtgatgtttgtcaggtatcaagctctgtaatatattgcagagctcatactgcacagctttgcttagtctgtgatgctaaaattcatggtggtagcaaggcttcgttgtgtcatgaaagagtttgggtttgtgaagnatgtgagcaggccccagctgtggttacatgcaaggcagatgcagcagctttatgtgtagcctgtgatactgatattcattctgccaatc

SEQ ID NO: 1878 - DNA, 456 bp, Pinus radiata
ctttggatttcatgggctcatttcactgactccgccgtgaaatatcactaatttcgcttcagagtttctgcaatattgccaaatatggagaattttcccgagcaggaacctgataatgccattgctctaccacacgaagatcgcggttcccgccaatttaagggaatccgactgcgaaaatgggggagctgggcatctgaaatccggataccgagatccagaaagaagatatggcttggctcatacactaccccggagcaggctgcccgcgcttacgacgccgcagtgtattgtctgagagggcgcaatgccgaattcaacttttctgtccctgacattccgactccgtcccccctttcccgtgagcaaattcagcatgccgccgccgaatatgcgttgagccaggccccttcgagtttggcctctttcataggttccccctcgcagtcgtcttcg

SEQ ID NO: 1879 - DNA, 491 bp, Pinus radiata
ccggagtgcttagatggagtttacgtccgcaatggcgcgaatccccggttcaaaccccgcggcggccaccatttatttgacggcgatggaatgatacatgccgtgacgctgagacacgggaaggctagttacagttgccggttcacggagaccgaaaggctcgttagcgaggagcgggcggggcggagcttttacccgaagcccatcgggcaactccacggccacggcgggctggtgcgcctgctgctgcatggtgcccgggggctctgcgggctggtcaacaccgggaagggcatgggcgtggctaatgccgggctggccttctttaacggccgtctgctcgctatgtccgaagacgatctcccgtatgccgtcagggtgacgggtgacggcgatctggtgacgacgggcaggttcgatttcgacgggcagcttcacgggtcgtcatcggtcaccgcgcaccccagcattgaccccgacacgggcgagct

SEQ ID NO: 1880 - DNA, 310 bp, Pinus radiata; identical to SEQ ID NO: 554

SEQ ID NO: 1881 - DNA, 251 bp, Pinus radiata
  misc_feature (1)...(251): n = A,T,C or G
ctggntcctccgatctcgctccctgtaacacgccccggtcagaaatggtgaaggaggaggattgtaaggtgccccaagaggccggaatcgtgaaggaatttcaagcctggactatgcccaagccctgcaacgtgtgcaggatcgcgagcgcttcgctctattgcagggccgacgctgcttatctctgctccggctgcgacgtcaaagttcacggcgccaacaagctggcgtcgcgccacgagagggtgtgg

SEQ ID NO: 1882 - DNA, 351 bp, Pinus radiata; identical to SEQ ID NO: 510

SEQ ID NO: 1883 - DNA, 450 bp, Pinus radiata
tcccttatcacagaatagaaactgatggctagtcagattccagaatgaaccctctaaattaaatgtagcccgcctagaacattagaagaagcaaaagcaaacattcatgatcaataaatgtagattaaaaccaccggcattgatgtgtagtagaagttgaatatggtcaggcatacttgttcctgttgctgtggctggtttcaagttcgtagagctttcctcggccagaaaaaacgatgagcgccacctctgcatcgcacagcactgaaagctcgaaggctttcttcatcagaccgcctcggcgcttccagaaggtcacctgcctgcgcacgctattctcgatcttcttggtttctattttaccgcgccccattttcagcaaaatcccaaaatctgagtatgggcaggcgttgaacttaaatttgctctatgaacagaattaccgagctt

SEQ ID NO: 1884 - DNA, 386 bp, Pinus radiata
aaatgatcagaggcggttctccagttattcacaacaaagaaaaggtcccgcgcttcgggcttctgcccaaatatgcttctgacgagagtgagctgaaatggatcgaggtcccggattgcttctgctttcatctctggaacgcctgggaagaaggagaagacgaggttgtcgtcatcggctcctgtatgaccccgccggacgccattttcaacgaatctgacagcgcgctgcggagtgttctgtcggaaattcggctcaatctcaaaaccggcttgtccaccagacgcgagatcacgccgatgaatctcgagagtacttctagagcggccgcgggcccatcgattttccacccgggtggggtaccaggtaagtgtacccaattcgcc

SEQ ID NO: 1885 - DNA, 190 bp, Pinus radiata
aaatgatcagaggcggttctccagttattcacaacaaagaaaaggtcccgcgcttcgggcttctgcccaaatatgcttctgacgagagtgagctgaaatggatcgaggtcccggattgcttctgctttcatctctggaacgcctgggaagaaggagaagacgaggttgtcgtcatcggctcctgtatgac

SEQ ID NO: 1886 - DNA, 412 bp, Pinus radiata
  misc_feature (1)...(412): n = A,T,C or G
ggtcccagccgccttcnggggcgttcgtgccgcaagatatgcttctgacgagagtgagctgaaatggntcgaggtcccggattgcntctgcnttcatctctggaacgcctgggaagaaggagaagacgaggttgtcgtcatcggctcctgtatgaccccgccggacgccattttcaacgaatctgacagcgcgctgcggagtgttctgtcggaaattcggctcaatctcaaaaccggcttgtccaccagacgcgagatcacgccgatgaatctcgagagtacttctagagcggccgcgggcccatcgattttccacccgggtggggtaccaggtaagtgtacccaattcgccctatacgtgagtcgtattacaattcacctggccgtcgttttacaaccgncntgactggga

SEQ ID NO: 1887 - DNA, 329 bp, Pinus radiata
atcagaaggcggttctccagttattcacaacaaagaaaaggtcccgcgcttcgggcttctgcccaaatatgcttctgacgagagtgagctgaaatggatcgaggtcccggattgcttctgctttcatctctggaacgcctgggaagaaggagaagacgaggttgtcgtcatcggctcctgtatgaccccgccggacgccattttcaacgaatctgacagcgcgctgcggagtgttctgtcggaaattcggctcaatctcaaaaccggcttgtccaccagacgcgagatcacgccgatgaatctcgagagtacttctagaagcggccggc

SEQ ID NO: 1888 - DNA, 101 bp, Pinus radiata
aaatgatcagaggcggttctccagttattcacaacaaagaaaaggtcccgcgcttcgggcttctgcccaaatatgcttctgacgagagtgagctgaaatgg

SEQ ID NO: 1889 - DNA, 326 bp, Pinus radiata
  misc_feature (1)...(326): n = A,T,C or G
atgatcagaggcggttctccagttattcacaacaaagaaaaggtcccgcgcttcgggcttctgcccaaatatgcttctnacgagagtgagctgaaatggatcgaggtcccggattgcttctgctttcatctctggaacgcctgggaagaaggagaagacgaggttgtcgtcatcggctcctgtatgaccccgctggacgccattttcaacgaatctgacagcgcgctgcggagtgttctgtcggaaattcggctcaatctcaaaaccggcttgtccaccagacgcgagatcacgccgatgaatctcgagagtacttctagagcggt

SEQ ID NO: 1890 - DNA, 246 bp, Pinus radiata
agctgaaatggatcgacgtcccggattgcttctgctttcatctctggaacgcctgggaagaaggagaagacgaggttgtcgtcatcggctcctgtatgaccccgccggacgccattttcaacgaatctgacagcgcgctgcggagtgttctgtcggaaattcggctcaatctcaaaaccggcttgtccaccagacgcgagatcacgccgatgaatctcgagagtacttctagagcggccgcggggc

SEQ ID NO: 1891 - DNA, 238 bp, Pinus radiata
aaatgatcagaggcggttctccagttattcacaacaaagaaaaggtcccgcgcttcgggcttctgcccaaatatgcttctgacgagagtgagctgaaatggatcgaggtcccggattgcttctgctttcatctctggaacgcctgggaagaaggagaagacgaggttgtcgtcatcggctcctgtatgaccccgccggacgccattttcaacgaatctgacagcgcgctgcggagtgt

SEQ ID NO: 1892 - DNA, 349 bp, Pinus radiata; identical to SEQ ID NO: 586

SEQ ID NO: 1893 - DNA, 417 bp, Pinus radiata
gaagaagaagaagaagaaagccccgtggtttcagggcgaatgagccgtagcgcctcagaatgggccttccagaagtttctcagttttgatggttccaagattccgtcagaagatggagaaggcgaacagaagcctctcggtgttaaagatcctctgcttcacggtcatatggacaacgtccctgcggcgctcagtcctctctttgccgaagtcaaggatgaggttcttcttcctactgaccctcgagattacgaggccttcctcaagcggaggcttaaccttgcctgcgcggcagtcgccttcactcgggttacaggaattagctctccaggccctggtccctcaacagtggatgcaaaccaatctcagaacactttaggatcagaaagagtgcatcgttggtatcccaatcttccg

SEQ ID NO: 1894 - DNA, 456 bp, Pinus radiata
ggaaggcaatgagagtgatctcctcaagggaatgaagaaggcaaggcgtgagagaggatcaacagcaaaggaacggattagtaaaatgcctccctgtgctgctggaaaacggagttctatctacagaggcgtcacaaggcatagatggacaggacgatatgaagctcatctttgggacaaaagtacttggaaccagaaccaaaataaaaagggcaagcaagtgtacctaggtgcctatgatgaggaggaggctgcagccagagcttatgaccttgccgctctgaaatattggggtcctggaactctcattaattttcctgttagtgactatgctagagatattgaagagatgcagagcatttcaagggaagatttcctggcttctctcagacggaaaagtagtgggttttcaaggggaatgtcaaaataccgtggactgccaagcaatcacaaact

SEQ ID NO: 1895 - DNA, 456 bp, Eucalyptus grandis; identical to SEQ ID NO: 1894

SEQ ID NO: 1896 - DNA, 388 bp, Eucalyptus grandis
gtaaatcaatacctggtcagcatcctaatttagcattcaatgttggcagtattagatccaaccagcagcagcttcagcaacagcatgatctgcccctcctccccaagccagcaacaatgccttttgcctcttcagtaagtatagcaaataattcccagatgcctggtttagggtcaagaggggtaatcaggatgacagatgcatccatcaaaagttccttagctcaaggtggtgggctgcagactggagttggcatgactgggttagacactaggggagttgctcttcagacagtatctcctgctaaccatatatctccggatgtaatctctaggaacacgatggattcgtcttcactctcaccagttccttatccgtttggccgggg

SEQ ID NO: 1897 - DNA, 202 bp, Eucalyptus grandis; identical to SEQ ID NO: 1251

SEQ ID NO: 1898 - DNA, 289 bp, Eucalyptus grandis
gttgaatggggattcaaacaatggcttcacaaggcggcggcggcagcagcggtaatgccagaggtggcggtggcaataatggaaaatccactgaagttcagccattgactcggcagaattcaatatacagtctcactcttgatgaggttcaaaaccagttaggtgatttagggaagccattgagcagcatgaacctggacgagcttttgaagaatgtctggacagctgaggccggtcagtcaatgtttatggatgttgagggcacggctgtggctaatcaaaatgctct

SEQ ID NO: 1899 - DNA, 477 bp, Eucalyptus grandis
cttgaaatcgggcgtgcccagctcgatcgcagcttcaagcagctcaaaaagactgtatatcactcgacgagtgtgctgagcacattgagctcgagctggtcatcaaagccgccattggcagtgaagtaccagctcaaccccggctcactcactgaatcagatgattcaaagagcctctgctccactctggacaagctcttggcttgggagaagaagctctatgaggaagtgaaggctagagaaggtgagaagatagagcatgaaaagaagttgtcagtacttcagagccaggaaggcaagggagaagatgaaaccaaggtagacaagaccaaggcctcattaaataagttgcaagcactaatagctgttacgtcggaggctgtctctacaacttcaaatgcaattattggcctcagagacagtagacttgtcccgcagcttgttgaactctgccatgggttcatgtacatgtggagg

SEQ ID NO: 1900 - DNA, 1243 bp, Eucalyptus grandis
cccccctcttcctcagtcagccagtctctctctctctctctctcacatctctagtttcagcctttttcctccatttggccaagcagcgcccgccgcgcgacccgaaggcttccggatctggtgctcgttgctattccgtccgtcgataggaggctaggctacgctgaaagaagttgatgagcgcaatttcactgatggagtggaatgcgaaacctcctctgcagtgggaatgggagaatcttatgatgttcggttcaaaagcgactgaaacctctaagccgctgcgagcgactgattggggaatcgaggcggaggagctgattgaccccgggtccttatttctgtatgagaatggtggcggcagcagcagttgtaccagcattgatccgggttacacttctgtgtccaagagctcgaaatcggcttctgtcaattcttcgtctacggacgaattgaaaatctcgaaattctctgtggaggcgcatgaaggcttttctctgcagagtagcaagaaagaattggcggtgaatgattttaccggaatgtcaccggcactcgagccttcggtctgctctggtgagccactgctcagtctaaagctcggtaaaaggatatattttgaaaatactattgacaaggatcatgtgaagacccaagaccttccttcggtcatgaaatcacctgatactccagcaaagagaaacaaatccaactgtcagggtacgtccgccccacgctgccaagttgaaggctgtaaccttgacctctcttcagctaaagattaccaccgcaagcatagagtttgtgagagtcactctaaatgccctaaggtcatcgtcagtggtatagagcgtcggttttgtcagcaatgcagcaggtttcatgggctatctgagtttgatgaaaagaagcgtagctgtcgcaagcgcctatctgatcacaatgcaagacgtcgcaagcccccgccagatgtgacccagttgaatccggctagactgtctgcactgttttatggtgggatgcagcagttgaatccagtcttgagcagagctccagctatccacaccaggtctactgctagttttaaatgggcagatacacaggacactaagctcatagagaaaggtccgaagcttccaataggcggaggtgttggtgagtgtatcactatcccaagcaatgggataccggacaccctcaagtccactggattgggcaaaagctataacgaacttctatcatc

SEQ ID NO: 1901 - DNA, 366 bp, Eucalyptus grandis
aaaaagtatatatacctcggcctatttgatagtgaagtagaggcagcaagggcgtatgacaaggcagctatcaaatgtaatggaagagaggctgtgaccaactttgaacctagtacgtacgatggagagatgattgcaaaagccagcaatgaaaatagcatctatggtgaccatggtcttgatctcaatctcgggatatcagcttcttccaggggaatggtggaaaccttagagccctcggacgacatgcgtcagggaagtagtttaagggtaggaaactctgctgcatcctggggtgatccatctgttgaaggtttatcgatgacatctggacaacctctccttgacgggtgtttatcctaccgt

SEQ ID NO: 1902 - DNA, 466 bp, Pinus radiata
ttaattcatggcggcggcggcgacgactacgttgggttgtgcgaaggtggatttgatacggctcatgcggctgcgagagcttacgacagggcagctatcaagtttcgaggagttgaagctgatataaattttactctcaccgactatcaagaagatttagaccagacgagcaagctctctaaagaagagtttgtgcatattctccgtcgtcaaagtactggtttctctcgtggaagttccaagtatagaggcgttaccctgcacaagtgtgggcgatgggaagccagaatgggtcaattcctaggaaaaaagtatatatatttgggattatttgacagtgaagaggaggctgcaagggcatatgataaggctgctatcaggtgcaatggaaaggaggcagtaacgaactttgatcctagcttatatgaaaaagaaattcttgaagaaagaagagagagtcagactt

SEQ ID NO: 1903 - DNA, 240 bp, Pinus radiata
gcttattggaatgcctgacactaactatggaagcgaacagacaaatgcttgcaaaaaacagaaaagaatacgttccaaggattcaggagaagatggtgaagatagacagagagaacatcctttcattgttactgagcccggtgaacttgcaagagggaaaaagaatgggttagactatctctttgatctttatgaacagtgcgggaaatttctgctggatgtgcaacatattgcgaagga

SEQ ID NO: 1904 - DNA, 495 bp, Pinus radiata
gccatggcaatagattttgcaggacgggaatctcctcgtgtgcaggctcgcagataccccattgccaggccgagggttgtaaggcaaacttgagcagtgccaaacactaccatcgccggcataaggtttgtgaattgcactcgaaggcttctactgttattgtgggtggtttcattcagcggttctgccaacaatgtagcagatttcatccaagatctgaattcgacgagggaaaacgaagctgcagaaagcgccttgctgaccacaacagacgaaggagaaaacctcagccaagtacatgtgttacatcacaatctcaggctgggacaacaggtttagaaaatgataaccagacaactaaaggatcatcaggtcacattacaacggctgttcagaatacaccgaacattagcagaagcactagtagtactagtccgtccttgattacatcagtaccgatgatgatgttcccaaataactataaaggacatagtc

SEQ ID NO: 1905 - DNA, 377 bp, Eucalyptus grandis
taacactacattcatcaccccaaacagcaaacggatcatctcgcacaatccatcaagtgtagatcgaccggcggaatctgcagcactggcaaagaggatgaggagggctcacattcagaatatagcgggagattgcaacttgaaagacagattacatatacaaagtggaatcacatatagtcagcaacaaagagctcccttttccacattggcgcagaacttccgcactagcaattcgcccccccagcaatctgaaagcaaccaaaaagaagccaccgatgatgctcatggcaccaacgtccaaggaacatttcttaaaaaggatgatccaaaagttactgctctgattcaacaagccgagctgctcagttcccttg

SEQ ID NO: 1906 - DNA, 377 bp, Eucalyptus grandis
gtgattttagtgctcgatactttgaaaagggcatcaatacagtcaaacgagataaaaagacataacatgcaaaactcaatacatgattctcagaaaagaccatcatctttaattcagtcaaacgaggctgtttttacgcaaacttcggtcataagctgtgccttgcaatcgtttgttaaacctccaaatgctaaggtcacggtcacattcctctctgatctttgagcagctcatggcaccaacgtccaaggaacatttcttaaaaaggatgatccaaaagttactgctctgattcaacaagccgagctgctcagttcccttgcggtgaaagtcaatgcagataacatggaccagagtcttgaaaatgcttggaaggg

SEQ ID NO: 1907 - DNA, 1668 bp, Pinus radiata
agctgtaagctacctacgaagtggaatcgaagagagagagagtgagaggctaactaataagatgaatatgaagattcgaacctccgacaccagtactcctgatgatcagcaacagcatagcggcgccgtgaaagtggcgattccggccgtgtcgggggattcggggacgattgggttaaagctgggcaagcggacctattttgaggcggtgaaggcaattccgacagcgatcccctcgccgtcttgcgttccggctgccaagaagcagcagtctgcgttgcagggaacgcatatggtgccgcggtgtcaggtggagggatgcgagatggaactcaccgccgcaaaggactaccaccgccgccacaaggtctgcgagctccactccaagtttcccaaggtcatcgtcaacgggatcgagcagcgcttctgtcagcaatgtagcaggtttcatacgttgtctgagtttgatgaagggaagcggagctgtcggaggcgtctagctggccacaaccagcggcgtaggaaaccccaacttaattcaacggcgatgaaagctgcaagatttgcttccactttctatgatgacgggcgacttagcagcatcctgatggctagatcacctttcatgcatccacggatagcttcaaacttggaggagaattcgctcgatttcaaacttggaggatatggaaaaggagcttggccgaggattaaggctgaggatgtatcatcatatgatgggcaattatcaaccaaataccctctcccgtcataatgctgaaagattgcttttccttttacagggttctaagactgtacctggtggagctattaatcaaagcactcatcagtacaggcaaagctccagggatcatgtgggccaatccttgaccttgtcatcctgctcgggagaaaatctaacaggtttaaatgttatatctgccccacatggtttatcaggagtctcggactctggctgtgcgcactagcttctgtcaattcaatccgggggcccaaggtcctcaggatcagcttcatttgatatgaccacgcggtcaggtctcacaatggatcaacttatactagaggatcaacctcttatggctcaagcaccattgatgcaaggagtacaacacaactttggtcattttgcagaagacaagttactaacaatgtatccccagtcctctactaatcttgcaacaggtgggttccctgcagctactgtgaattctatggataagcagcaccaaggtcatccactcgtttccgatgcaggccaaatggtaaactttggaggaaatatatttggcttgctgcaggggagcagtttcagaggctctcaagctgcaagttcacaagatattcaaggcaccatagatctgatgtgcacgtcctcggaaacacaaactaatgattctcatgatcaacttggcatggtgcaccagggaagtaaacagtttactgacttgcagttgttgaggtcttttgaatcatctatttatgacactcatcaactgctgtagctctaatctggttgttcttccggcatgttttctttgccctcagacttgaagataactgttaaaacttcattatgacaattatctgtaccctctaaatgcagacaattgctttcaattacccttgcttatttcaaaaaaaaaa

SEQ ID NO: 1908 - DNA, 821 bp, Eucalyptus grandis
ctctctctctctctctctctctctttctttctttctttctctctctagcagaggcacagaggcgcgcagagggcactgatgatgacgactggggtagctccaatgaatgggctctagagaacctcgctcatggacgtgggttcgggctcgtggacgacggagtccgggtcctcttctcctccccctctcgagtccctcaacggcctcaagttcggccagaaaatctacttccagaataataacagtagtaataatgccgccgcacccaagaacggctccggctccggctccggctcctcctccgccgccgcgcccgcgcccgggtcgggcacgcccccgaagaaggtgagggcctccgccggcggcggcggctgcggggcgatccagggcgggcagcccccgaggtgccaggtggaaggctgccgggtggatctgagcgatgccaaggcttactattccaggcacaaggtgtgcggcatgcactccaagtccgccaccgtcatcgtcgccggcatcgagcagaggttctgccagcagtgcagcagattccatcagcttactgaatttgaccaagggaaacgaagctgtcgtagacgtttggctggtcacaatgagcgccggaggaagcccccacctgggtcgctactatcctctcgctatgggcgactgcaatcctctatatttgagaacaccaccagagtgggtagttttctgatggatttcacagcatacccgaagcatgcatggtcagcgccacgtttttctgagcgcacgacacctggagatctagtccccggaccaggaaaggtctatcctcatcc

SEQ ID NO: 1909 - DNA, 105 bp, Eucalyptus grandis
gggaagaggagcgtagagtgggattcgaacgattggaagtgggacggtgatctgttcgtcgctaggccgctgaacccggtcccgtccgatttccccggccggcag

SEQ ID NO: 1910 - DNA, 338 bp, Pinus radiata
cagaagagacctgccatggaaacacattttgcaggacagaaatttcatcattcacaggctcacagataccccagtgccagtccgagggttgtaaagcaaacttgagcagtgccaaacactaccatcgccgacataaagtttgcgaattccactctaaggctcctacggtcgttgttggcggtcagattcagcggttttgccaacagtgtagtagatttcatcagacatctgaatttgacggaggaaagcggagctgcagaaagcgccttgctgaccacaacagacgccggcggaaacctaaaccgagtcaatgtactacatcccaatgtcaggcaggg

SEQ ID NO: 1911 - DNA, 465 bp, Pinus radiata
tcgacatggtcctttgcattttcttgaagaagctgtgattgttcgaccgacacgttactcattcacattgcctctccatctccttcaatcaggattccagaattgcccgtcgaaatggatgaagtccaagtcaaggtcgacattcagagcacaaatgtcagtgccgacgagcccaggcctgcgaagcgccagggtttcgagctcgccaagagccctgaaaacgtggcttcgaaatccactgcgctctcctctccgaaaaaacccaaagctgcttcttcctcttcttcttcgtcgccgagagcgcagcctcccgcttgccaggtggagaaatgcgcggcggatcttgctgatgccaaagagtactataggaggcacagggtttgcgagcaacattcaaaggctcgaattgtgctcgttcttggcctccagcaacgcttctgccagcaatgtagcagattccatgtg

SEQ ID NO: 1912 - DNA, 509 bp, Pinus radiata
ctccttacaaaagtagctcccctcttgactccaggcggtcttcccagtccataacgatacggattacacccacgcaccccatgtcttccacctcatcgtattcttctccctcccctgacacaccatcacagtctgccgctgtgcgcccgacatctacccgagacgattcttccgtcatggaacctccacgtaagcgagccagggctgatcttaacgctgaacagcgaagagaggccagggcccaccgtaatcgaattgccgctcaaaactctcgcgataaacgcaaggcgcaattcacttacatggagcagcgcgtggcacaactggaggaagagaaccaacgactacgagcaggcatgggcctctctcaattcacgccagccgacaacgacaagttcgtcagcctcgagagagaatcagtacaggcccgcgagaacagagagctcaaggagaggatcaagagtctagagagcgggtggtcggccgtcatcaaagcgttgcaggcctca

SEQ ID NO: 1913 - protein, 151 aa, Pinus radiata
EGNESDLLKGMKKARRERGSTAKERISKMPPCAAGKRSSIYRGVTRHRWTGRYEAHLWDKSTWNQNQNKKGKQVYLGAYDEEEAAARAYDLAALKYWGPGTLINFPVSDYARDIEEMQSISREDFLASLRRKSSGFSRGMSKYRGLPSNHK

SEQ ID NO: 1914 - protein, 128 aa, Eucalyptus grandis
KSIPGQHPNLAFNVGSIRSNQQQLQQQHDLPLLPKPATMPFASSVSIANNSQMPGLGSRGVIRMTDASIKSSLAQGGGLQTGVGMTGLDTRGVALQTVSPANHISPDVISRNTMDSSSLSPVPYPFGR

SEQ ID NO: 1915 - protein, 66 aa, Eucalyptus grandis
AKHAQTPPTSWEGGSGADSEVNMLKDYASEDWITGVDRFRLSLVEFLDKLNKYAESSVHMYVSLEK

SEQ ID NO: 1916 - protein, 89 aa, Eucalyptus grandis
MASQGGGGSSGNARGGGGNNGKSTEVQPLTRQNSIYSLTLDEVQNQLGDLGKPLSSMNLDELLKNVWTAEAGQSMFMDVEGTAVANQNA

SEQ ID NO: 1917 - protein, 159 aa, Eucalyptus grandis
LEIGRAQLDRSFKQLKKTVYHSTSVLSTLSSSWSSKPPLAVKYQLNPGSLTESDDSKSLCSTLDKLLAWEKKLYEEVKAREGEKIEHEKKLSVLQSQEGKGEDETKVDKTKASLNKLQALIAVTSEAVSTTSNAIIGLRDSRLVPQLVELCHGFMYMWR

SEQ ID NO: 1918 - protein, 349 aa, Eucalyptus grandis
MEWNAKPPLQWEWENLMMFGSKATETSKPLRATDWGIEAEELIDPGSLFLYENGGGSSSCTSIDPGYTSVSKSSKSASVNSSSTDELKISKFSVEAHEGFSLQSSKKELAVNDFTGMSPALEPSVCSGEPLLSLKLGKRIYFENTIDKDHVKTQDLPSVMKSPDTPAKRNKSNCQGTSAPRCQVEGCNLDLSSAKDYHRKHRVCESHSKCPKVIVSGIERRFCQQCSRFHGLSEFDEKKRSCRKRLSDHNARRRKPPPDVTQLNPARLSALFYGGMQQLNPVLSRAPAIHTRSTASFKWADTQDTKLIEKGPKLPIGGGVGECITIPSNGIPDTLKSTGLGKSYNELLS

SEQ ID NO: 1919 - protein, 122 aa, Eucalyptus grandis
KKYIYLGLFDSEVEAARAYDKAAIKCNGREAVTNFEPSTYDGEMIAKASNENSIYGDHGLDLNLGISASSRGMVETLEPSDDMRQGSSLRVGNSAASWGDPSVEGLSMTSGQPLLDGCLSYR

SEQ ID NO: 1920 - protein, 155 aa, Pinus radiata
LIHGGGGDDYVGLCEGGFDTAHAAARAYDRAAIKFRGVEADINFTLTDYQEDLDQTSKLSKEEFVHILRRQSTGFSRGSSKYRGVTLHKCGRWEARMGQFLGKKYIYLGLFDSEEEAARAYDKAAIRCNGKEAVTNFDPSLYEKEILEERRESQT

SEQ ID NO: 1921 - protein, 79 aa, Pinus radiata
LIGMPDTNYGSEQTNACKKQKRIRSKDSGEDGEDRQREHPFIVTEPGELARGKKNGLDYLFDLYEQCGKFLLDVQHIAK

SEQ ID NO: 1922 - protein, 164 aa, Pinus radiata
HGNRFCRTGISSCAGSQIPHCQAEGCKANLSSAKHYHRRHKVCELHSKASTVIVGGFIQRFCQQCSRFHPRSEFDEGKRSCRKRLADHNRRRRKPQPSTCVTSQSQAGTTGLENDNQTTKGSSGHITTAVQNTPNISRSTSSTSPSLITSVPMMMFPNNYKGHS

SEQ ID NO: 1923 - protein, 125 aa, Eucalyptus grandis
NTTFITPNSKRIISHNPSSVDRPAESAALAKRMRRAHIQNIAGDCNLKDRLHIQSGITYSQQQRAPFSTLAQNFRTSNSPPQQSESNQKEATDDAHGTNVQGTFLKKDDPKVTALIQQAELLSSL

SEQ ID NO: 1924 - protein, 50 aa, Eucalyptus grandis
AAHGTNVQGTFLKKDDPKVTALIQQAELLSSLAVKVNADNMDQSLENAWK

SEQ ID NO: 1925 - protein, 257 aa, Pinus radiata
AVSYLRSGIEERESERLTNKMNMKIRTSDTSTPDDQQQHSGAVKVAIPAVSGDSGTIGLKLGKRTYFEAVKAIPTAIPSPSCVPAAKKQQSALQGTHMVPRCQVEGCEMELTAAKDYHRRHKVCELHSKFPKVIVNGIEQRFCQQCSRFHTLSEFDEGKRSCRRRLAGHNQRRRKPQLNSTAMKAARFASTFYDDGRLSSILMARSPFMHPRIASNLEENSLDFKLGGYGKGAWPRIKAEDVSSYDGQLSTKYPLPS

SEQ ID NO: 1926 - protein, 230 aa, Eucalyptus grandis
MDVGSGSWTTESGSSSPPPLESLNGLKFGQKIYFQNNNSSNNAAAPKNGSGSGSGSSSAAAPAPGSGTPPKKVRASAGGGGCGAIQGGQPPRCQVEGCRVDLSDAKAYYSRHKVCGMHSKSATVIVAGIEQRFCQQCSRFHQLTEFDQGKRSCRRRLAGHNERRRKPPPGSLLSSRYGRLQSSIFENTTRVGSFLMDFTAYPKHAWSAPRFSERTTPGDLVPGPGKVYPH

SEQ ID NO: 1927 - protein, 35 aa, Eucalyptus grandis
GKRSVEWDSNDWKWDGDLFVARPLNPVPSDFPGRQ

SEQ ID NO: 1928 - protein, 112 aa, Pinus radiata
EETCHGNTFCRTEISSFTGSQIPQCQSEGCKANLSSAKHYHRRHKVCEFHSKAPTVVVGGQIQRFCQQCSRFHQTSEFDGGKRSCRKRLADHNRRRRKPKPSQCTTSQCQAG

SEQ ID NO: 1929 - protein, 117 aa, Pinus radiata
MDEVQVKVDIQSTNVSADEPRPAKRQGFELAKSPENVASKSTALSSPKKPKAASSSSSSSPRAQPPACQVEKCAADLADAKEYYRRHRVCEQHSKARIVLVLGLQQRFCQQCSRFHV

SEQ ID NO: 1930 - protein, 143 aa, Pinus radiata
MSSTSSYSSPSPDTPSQSAAVRPTSTRDDSSVMEPPRKRARADLNAEQRREARAHRNRIAAQNSRDKRKAQFTYMEQRVAQLEEENQRLRAGMGLSQFTPADNDKFVSLERESVQARENRELKERIKSLESGWSAVIKALQAS

SEQ ID NO: 1931 - DNA, 199 bp, Pinus radiata
aacaactgaacaataaaaatcacaagcactgaatctaaccatctctccacaaagcagaatcattttttagcagtgcagaattaaatcaaaacacaattgttcggctgtaaagcaaagatgaagcatcacgtagtgcacaattgctgtagcaagaaagctgtaaagagaggcttctggtcgcccgaggaagatttgaagc

SEQ ID NO: 1932 - DNA, 380 bp, Eucalyptus grandis
gggatctctaggaacttcgtgaaaacgcggacgccgacacaggtggcgagccacgcccagaagtacttcctccggcggaccaaccagaaccggcgacgccggcggtccagcctcttcgacataaccaccgactcgtactttggggtttcaagctctacaatggaggagggtcatcatcaagcgcaccaagtacccagcttccctctttccttgcctccggcggtttcaccgggaaccggcgagaaactgctggaaagtctgcgactaagaaaagagggctgccagtcgaaacccaccccgtcgaagcccatccgcccggtcccgatccttcccatccctccgtcctcgaaaatggcggctctcgacctcaacaaggcgac

SEQ ID NO: 1933 - DNA, 630 bp, Eucalyptus grandis
ggaccggcgagtttctccggggaagaccggcggagcggcggcggcggcggcggcggcggggggaaaagctcccgcctttcgtcgtttcgcggtccgtggaataggcgacaagtcggattgcgttgcgtgtcgcgcctcgcttcgtatataagggcggcttgctgctgctgctactggtctgaggagtcaaccgagctcgagcgttacgcgcttcccgaaggttccgccggctagggtttttttatatttccctctgtttttcctccgttcggccacggtcgttgcttcgctttaaaaggattggcgcgattgagctgggcggagcttgagggttcgggcggtggcggcggaagtggagtggagcggggggtggtggtgctcgacatggtaatcgggttctgacgatgccgagctttgttccagcgacaccggcctccaattccattggttcggagggaaacgttgtccagtctaatcaaaatacagattttgggtcgtttgagcattcacttggattccgcatagaggatgccatcaaccttagcagaacagatcctgtctttaatcagataaaaccaaacggtcgagctcttggaactgacattcaagctcgtgcttttaataagtctg

SEQ ID NO: 1934 - DNA, 524 bp, Eucalyptus grandis
ctttactattctaagtcctctacttctggtttggaatcactaatttcttggtctcactttcgcttggcctatcacccgagagttctctgcagaaacttcacagccgtcctctgctctttcaccaaccattgtatgcctggttttactagggctaggaagatgagcatgtccggagaagaagagggtgacctgcgaagggggccatggactcgcgaggaagacaatttgctcattcactcgatcacatgccacggcgagggacgctggaatatgttggcgaagagcgcaggattgaagagaactggcaaaagctgcagattaaggtggctgaattacctgagacccgacatcaagcgcgggaatctcaccccgcaagaacagctcatgatccttgaacttcaccacaaatggggcaacaggtggtcgaaaatcgcgcagtatctcccaggaaggacagataacgagatcaagaactactggaggacgcgggtgcagaagcaagcgcgccagctcaacatcgaatc

SEQ ID NO: 1935 - DNA, 440 bp, Eucalyptus grandis
gtgctgtgacaaggtgggattgaagaaagggccgtggacacctgaagaagaccagaagctcctcgcttacatcgaagagaacggccatggaagctggcgtgctttgccttccaaagctggtcttcagagatgcgggaaaagctgtaggctaagatggactaattatcttagacctgacatcaagagagggaagttcagcttacaagaggaacagaccataattcaactccatgcccttcttggcaataggtggtcggccatagcaactcatttaccgaagcgaacagacaacgagatcaagaactactggaatacgcatctgaagaagagattggcgaaaatgggaattgacccggtgacccataagcctaaaaatgacgccctagtctctagtgacggtcaatccaagagcgcggctaagctcagtcacctggctcagt

SEQ ID NO: 1936 - DNA, 299 bp, Eucalyptus grandis
cggacccttccgaaaaatgcagggctcaggagatgcggaaagagctgtcgcctgcggtggacgaactacctgcggcccgatatcaagagagggaggttcacgttcgaggaagaggagaccatcatccagttgcatggtgttttggggaacaagtggtcggctatcgcggctcaattgcccgggaggaccgacaacgagatcaagaactactggaacacccacatcaagaaaaggctacttaaaatggggatcgacccggtgacacactccccacgcctcgatcttctagatctgtcctc

SEQ ID NO: 1937 - DNA, 377 bp, Eucalyptus grandis
ggcccctctctctttctctctctctgtgtctgtctttcttgtggatccaccaggctcgtctttaagaatatacagcagcgagcaggcaagacaacgccccatctctcttctctctctctctctctctgtggctctgtctttcttttgtttcttgccgttttggggtgtgtgtgttgggttgtgtgaattggagcgaggatggggagggggagactgcagctgaagaggatagagaacaagatcaaccggcaagtcaccttctccaagaggagggcgggtctgctcaagaaggcccacgagatctccgtactctgcgacgccgaggtcgccctcatcatcttctccgccaagggcaagctcttcgagtactccaccga

SEQ ID NO: 1938 - DNA, 278 bp, Eucalyptus grandis
tgttagcaagcatgtatgtactaactagtagtttttgtaaagcatgatgtcgaaaccttgagtagcaaggtgaagatggctgaagagacggttaaaagagtaaccggactgaacccaatgctgcatgtgatgtccgacatgtcttctgtgggtgtgccaccatttgatggtagtccttctgatacatcagcggatgctgcagttcctgtgcgagatgacccaaagcaccaattctatcaaaccaattctagtaaccccgcatcatctgctgacgatat

SEQ ID NO: 1939 - DNA, 342 bp, Eucalyptus grandis
acaggttgctcaattaagagttgagaattctactttactgaaacgtctctcggacataagccagaagtacaatgtagcagctgttgacaacagagttttggaagctgatgtcgaaaccttgagagcagaggtgaagatggctgaagagacggttaaaagagtaaccggactgaacccaatgctgcatgtgatgtccgacatgtcttctgtgggtgtgccaccatttgatggtagtccttctgatacatcagcggatgctgcagttcctgtgcgagatgacccaaagcaccaattctatcaaaccaattctatgtaaccccgcatcatctgctgacgatatga

SEQ ID NO: 1940 - DNA, 376 bp, Eucalyptus grandis
gctgttttcacatctttttgaacacgcccctaaagatccgccctcagagccgcctctgtccggtggctgctgacattccacctagaaattcccgaccaagttccccctttctaagccagattgggaaaggttcatatttgtccaacagtagtagtggatttaaatggggaggcactcttgctgctacaagcagaagctgaggaaaggcctctggtcacctgaagaagacgagaagctcctcaggtacatcacgcagtatggccatggttgctggagctctgttcctaagcttgcaggtctgcagaggtgtgggaagagctgcagattgaggtggattaactacctgaggcctgatttgaagaggggcacattctct

SEQ ID NO: 1941 - DNA, 169 bp, Eucalyptus grandis
aggaattgcagcacctggaacagcaattgagtggggccttatcatctgtcaaggagaagaaggagcaatggcttctggagcagctggagcgttcaagattacaggagcagagggctatgctggagaatgaaactctgcgcagacaggtcgacgagcttagaggtttcct

SEQ ID NO: 1942 - DNA, 188 bp, Eucalyptus grandis; identical to SEQ ID NO: 27

SEQ ID NO: 1943 - DNA, 321 bp, Eucalyptus grandis
ctctttcctcctcaatcggaagggttcttcaacccaatggacggcaacctctcattgcaaatcggatacaatccgacatgtctggacgagatgaatgcttcggtttcgagccaaaatgttgctggattcattccgggatggatgctttgaacttactacatcgacttggagtgtgaatcgagctggtgaaatttgtgcgtgtgtcccttgtaaaattgcgatccgcaagacaataagtacataatattttggagctgtgatgacataaaaagaggaaggccaccctttcctctctcatgatcagaacttttgataatgtct

SEQ ID NO: 1944 - DNA, 905 bp, Eucalyptus grandis
ctagtggatcccaagtctccatcatcatgatctccagcaccggcaagctccacgagtacatcagcccctccacctcaacgaagaagatgtacgatcagtatcagcaggcgctcgaggttgatctctggagctctcactatgagaagatgcaagagaacctgaggaagctgaaggaggtgaacaagaagcttcagctggaggtcaggaggaggttcggggaaggactgaatggtatgagcttatcggaattgtgcggtcttgagcaagatatggacaacgccgttagcctgatccgtgaacggaagtacaagacgctcggcaatcaaatcgacaccgccaggaagaagaaaaagaatgctgaggaaataaacaaaagtctcctgcaagactggaccaatctgatcaagcatctgagggaggacgacccgcacttcggaatggtcgacaacggcagggattacgaggctgtgatcgggtatacagacgccgccgccgccgctcgcttgtacaccctgcgcctgcaaccggaccagcccaatcttactagcggaggaggatcggagatcacgacctaccctttgctcgagtgagacgaaggcgtcggaaacccttccgacgtcctcatattgtctattcattctgtctaagggccgattccatctggaatcctgacttcattggtatgtcgaagtttaggactttgttatgtcatcctattcagcagctaagtttgttcttatcagaagctgttcctattatggaccgagggcgatttcctctagggcatcatgtgttttaagacaagtctatatataagactactttaaaacaatcgaatgagttggtgcaaaaaaaaaaaaaaaaaaaaaaacaaaaaaaaaaaaaaaaaaaaaaaaaacttcaag

SEQ ID NO: 1945 - DNA, 337 bp, Eucalyptus grandis
gcggcaaggagcaactaaatgtaacactctgattactagggacctctcattgtctttggatggcatttaaatcaccaggaggaatcacgtggctgaaacatttacttgtgaagaacttttacttaggggagcatctaaaatgcaggaatgggctcatcaagaaggcctacgagctctccgtcctctgcgacatcgacatcgccctcatcatgttctccccctccgaccgcgtgagccacttttcgggaaaaagaaggatcgaggatgtcttgacccgtttcattaacctcaccgaccaagaacggacactcctagatgtccaggatcggcgcacacg

SEQ ID NO: 1946 - DNA, 301 bp, Eucalyptus grandis; identical to SEQ ID NO: 26

SEQ ID NO: 1947 - DNA, 354 bp, Eucalyptus grandis; identical to SEQ ID NO: 64

SEQ ID NO: 1948 - DNA, 456 bp, Eucalyptus grandis
gtttcctcttcaggagaaagcaaggagctgtagaggaattgaaaatggtgcaagaagtccgaaagggtccatggacagaacaagaagatttccaactggtgtgctttgttggactttttggagatcgccgatgggattttatagcgaaggtatcaggtttgaaggtggcgggagaaaataataggtatgttcgttttaaagcctgggggttttttggaaggagctacttctaaccgcccagctttattccaggattgaatagaacaggaaaaagctgcagactacgctgggttaactacctgcatcctggcctaaaacgagggaagatgacacctcaagaagagagactggtgctcgaacttcattccaaatggggaaatagatggtcaagaattgctcgcaagctaccagggcgaacggacaatgagataaagaactattggaggactcatatga

SEQ ID NO: 1949 - DNA, 382 bp, Eucalyptus grandis
atttttcaactccccccccccaccccgaatcaaatcccattccctctctccctccctccctttttttcccccaatcttttgttgcgttttcaagcacccacgccccccaatctccaacgccatcaatcaagctcaagcaccatcacctcaagaagaaagaaggaaagaaagagagaaggaccggagacccgacagagggtcgcgcgcgcacgagacatgggacgatccccttgctgcgagaaggcgcacaccaacaagggcgcgtggaccaaggaagaggaccagcgcctcatcgactacatccgcctccacggcgaaggttgctggcgctccctccccaaatctgccgggcttctcaggtgcggcaagagctgcaggctca

SEQ ID NO: 1950 - DNA, 371 bp, Eucalyptus grandis; identical to SEQ ID NO: 66

SEQ ID NO: 1951 - DNA, 356 bp, Eucalyptus grandis
aaaaagcataagctccctgacccataatccctagtatcgatggccaggtttcccagggttgacaagagcaacagcaagaagacagtgaagaagggcgcttggagtgcggaagaagaccagaaactggtggcttatatcaagagatatggcatttggaactggactcacatggccgaacccgccggtttagcgagaacaggaaagagttgccggcttcgatggatgaactatctgaggcccaacatcaagcatggaaacatcacccaagaagaggaagaaatcattattaacttgcaccgagttcttggtaaccgttgggccagcatagcgagcagactttcaggaaggacggacaa

SEQ ID NO: 1952 - DNA, 475 bp, Eucalyptus grandis
ctcccctctcctggctctcgctctctctctctctctcagttctttctcggacgggtgtctgtgcgtggcttttgatcggtcatcacctgaggccgcgtctgcaagcaagtgaagaaggaggacaaggaatatggcgagagagaagatcaagatcaagaagatagacaatgtgacggcgaggcaggtgacgttttctaagaggagacgagggcttttcaagaaagccggagagctgtcggtcctgtgcgatgccgaggtcgctgtcgtcattttctcggctaccggcaagctctttgagtactccagctccagcatgaaggacactcttgagaggtacaccctccaccacaataatcttgagaatatggaccaaccttctctcgagctgcagctggagcatagcaataacatgaggttaagcaaggaagtggcagaaaagagccatcgactcaggcagttgaggggtgaggatctt

SEQ ID NO: 1953 - DNA, 541 bp, Eucalyptus grandis
atcgcccccgttctctccctctctctccctctcccccctaacgtttctggccctcttctttgtctggacaaaaagatgggaagaaagtgctctcgctgtgggaacataggccataactcaaggacttgcacaactttcatgggggcagcaagtgcttgtgggctcaagctcttcggtgttcaacttgacctatcttcttcttctcctccttcatcatcagcatctagtggttctgctcatccttattcacttgtcataaagaagagcctcagcatggatcgtctgtcttcttcctcggcctcctcctcgtctccatcttcatccctctcctcgccaagagttcttgctgatgaacactgcaataagacctccctcggatatctctctgatggcctcgccgctagatcccaggagaaaaggaaaggagttccgtggacggaagaagagcatcggacattcttaatggggctagagaagatggggaaaggcgattggagaggcatctccaggaactatgtgaccacgagaaccccaacccaag

SEQ ID NO: 1954 - DNA, 437 bp, Eucalyptus grandis
cgcggttggcgtcagatagaagagcatgtaggaaccaaaactgcagttcagatacgaagtcatgcccaaaagttcttctctaaggttgctcgcggggtaagtggcagcagcgagggtgtgattaaaccaattgaaatacctcctccacggccaaagcggaagccaatgcatccatatccacgcaaatctgtcgattcaaaggaggtgaaactgtcctatcaacaagagaggtctccatctccaatctcttcggtagcagatgaaaacactggatctcctacttcagttttgtctgctcatggttcagacatgctgggatcagcatctttgcatcaacaaaacagatgctcttcaccgacttcatgtaccactgatgtaccctctattggtctagctgtaattgagaagcaacctgaaatattcaaagaagaagataa

SEQ ID NO: 1955 - DNA, 470 bp, Eucalyptus grandis
attcggtcacgagttcacttcgtcgcctgcctcgtcgtcctccctgtcctcctcgcgaatctccatcggcgagaactctgataaagcatccctcggctatctgtcggatggcctgctgggtagatcccaagagaagaagaaaggagttccatggacagaggaggaacacagaaccttcttggtggggcttgagaagcttgggaagggtgattggagaggcatctctaggagctatgtgaccacaagaacaccggcccaggttgcaagtcatgctcagaaatatttcctccggcaagtgagcttcaacaagaaaaagcggcgctcgagcctctttgacatggttgatgtcaaaaccgcggcgggtgatcgtttaggcagtttgacggccaagccgagtgagtcagttcctaattgcaaaatgggaaccttgatgtctcatttgcaagttcatgatgccagaaccactcagc

SEQ ID NO: 1956 - DNA, 384 bp, Eucalyptus grandis
ctgaaatttcgtcttcaagccatggaacaacaggcgcaactacgcgatgccctgaatgaagcattgactgctgaggtgcaacgattgaagcttgcgacagcagagctcaactcggaatctcatccttcaaagtgcatggtttcacagcttcctgtgagctcccaaatgttccagctccatcagatgcaacagcagcagcagtctcagcaacaaactcaatcacagcagcaaaatggtaacacaaccacaaagtcagagtcgaatcaataggacgtgggtggtccaacaactccggcgcctggacaaacctcacttgtctcggttcttcgacaccctgcagtagttctctagtgcatccattcattcattagtttttgcatatgc

SEQ ID NO: 1957 - DNA, 388 bp, Eucalyptus grandis
gtttcctcttcaggagaaagcaaggagctgtagaggaattgaaaatggtgcaagaagtccgaaagggtccatggacagaacaagaagatttccaactggtgtgctttgttggactttttggagatcgccgatgggattttatagcgaaggtatcaggtttgaaggtggcgggagaaaataataggattgaatagaacaggaaaaagctgcagactacgctgggttaactacctgcatcctggcctaaaacgagggaagatgacacctcaagaagagagactggtgctcgaacttcattccaaatggggaaatagatggtcgagaattgctcgcaagctaccagggcgaacggacaatgagataaagaactattggaggactcatatga

SEQ ID NO: 1958 - DNA, 455 bp, Eucalyptus grandis; identical to SEQ ID NO: 60

SEQ ID NO: 1959 - DNA, 965 bp, Eucalyptus grandis
aagagaaaagatacaatccgccgtggacccaagaaggtcaaagcccgctctctgcacgatgatgggtagtagtagtagtactacttatcttccgtgaggtctctcgaattagggttttcttgattttcgccaaccccccaatatttatcttttctttctttcctttttttcgcttctctcgcagttcacctagaaaagctacgagggcttcgcaccagttccgtacggggctgcttcagtgcgtagcgtgtactatctcgtctcaggtggtgtttcgcttttatggggatgtccttcggcgggggcgtttcgaagattcttgtagctccgtagcttgtcctgcgggatttggttgggccgatcgtcaggtttcttccagttaaagttgcgatttttaaggggagcgagggcgtttgagctggtaaagttcgaagctttttgagttcggccgccagggttgtgtcctagagataactggaggcgaaagggtgcgttccggtccggtcagcatccgctgactcaggagatggttgggggttgttggtggcggcggtgatgatgattcatgggtagtaggactagagttggcggtggtggagatgatggcagagttgtgaacggcatgccgagcttcgtccctcaattacccacttcgaattccatgggatcagaaggaaactccattcgttcttctcgaattacagactttggaacacttgagcagtctcttggataccgcatagaagatgcagttgacctcagcagaaatcctgtcttcaatcagatgaaatcaagtgcccaggctcttggggctgatgtccaatttggctctttgaataagtccctttcatcctcagacagaaatctttctgtgaatattgtggggtctcagactctatctatgcatagagaatcacaatcaaacttagtatcaatacccggtgctcatcgtgagaactgggggg

SEQ ID NO: 1960 - DNA, 599 bp, Eucalyptus grandis
gtccggtccggtctcctccctcccttcctccctccttccttctctctctctctctctctctctctcgccgtccaaccgtacggactctcggttttgccgcgaaacggaacggagcggacccggtccctcgccgtcgccggtgcgagagaatgcctcccccacgcgccgccacccccgacgtcgccggcgacgagagctccggcgccgacgccggcgccggggagatcatgctgttcggggtgcgggtggtcgtggactcgatgaggaagtgcgtgagcctgaacaacctgtctcagtaccagcacccgcaggacgcgaatccgcccaacgccagcggcgggagcggcggcaacaaggaagaggccgccaaaggctacgcatcggccgacgacgccgcgcacaaccccggcggtggccgcgagcgcaagagaggagttccttggacagaggaggagcacaggctgttcttgttgggattacagaaggtggggaaaggagattggagagcgatatccaggaactttgtgaagacccgcacgcccactcaggtcgcgagccatgcccagaaatatttcctgcgccgaagcaacctcaatcgc

SEQ ID NO: 1961 - DNA, 377 bp, Eucalyptus grandis
ggagaacgtggcttctgggtcgactgagcggccgagaattagacatcagcatagccagtctatggacgggtcgacgagtattaagcccgagatgcttatgtcgggttcagaggatgcatctgctgcagacgccaagaaggccatgtctgctgcgaagcttgctgagcttgcactgattgatcccaagcgtgcaaagaggatctgggcaaacagacaatcggctgcaaggtcaaaggaaaggaagatgcgatacatagctgagctagaacggaaagtacaaactttacaaactgaagcaacaactttgtctgcacagctgactctgctgcagagagacacaaatggtttgactgctgagaatagtgaattgaaactgc

SEQ ID NO: 1962 - DNA, 317 bp, Eucalyptus grandis
aagtaaaatcccctctcggctcctctttcttttatgtacattccaagaacagcgacagataaggccccgagatctgcaagtcttcttcacactactcgctgatggctgattctgaacattcttcttctgatgacacttacgtggactctagagaagagacaagtgaagaatcaaagctagatttctctgaagatgaggagacgcttgtaattagaatgtacaacctggttggagaaaggtggtctctaattgctggtagaatcccagggaggacagctgaagaaatcgagaagtactggaattccagatattcaaca

SEQ ID NO: 1963 - DNA, 471 bp, Eucalyptus grandis; identical to SEQ ID NO: 74

SEQ ID NO: 1964 - DNA, 372 bp, Eucalyptus grandis
tgacactgaagattcgaagaagaaagagaggcatattgtgacttggtctcaagaggaggatgatatactccgggagcaaatcggtatacatggaactgagaactggtcgattatcgcatcaaagttcaaggataaaacgacgagacaatgcagaaggagatggtacacatatttgaattctgacttcaagaaagggggttggtcacccgaggaagatgtgcttttatgtgaggctcagaagattttcggcaacagatggacagaaatagcaaaggtggtttcaggcaggactgacaatgccgtaaaaaatcggttcacaaccttgtgtaagaaaagagcaaggtacgaagccttagcgaaagagaatacact

SEQ ID NO: 1965 - DNA, 424 bp, Eucalyptus grandis
atgcaattttgagcgtcgcgagtaagccggagcgaggggagagcgatgggcaggcagccgtgctgcgacaagcttggggtgaagaaagggccgtggacggcggaggaggaccggaagctggtcaacttcatactcacccacggccaatgctgctggcgggccgtccccaagctcgctgggctccgccgctgtggcaagagctgccgcctccgctggaccaactacctccgccccgatctcaagcgtggcctcctcaatgaagccgaggaaagcctggttatcgatctccatgccactctcggcaataggtggtccaaaatagcagctagactacccggaagaacggacaacgagatcaaaaaccactggaacacccatatcaagaagaagctcattaggatgggcattgatccagtcactcaca

SEQ ID NO: 1966 - DNA, 427 bp, Eucalyptus grandis
cccggctcccgctcgtccaatcggcgcgtcgagaggaagaaaggtaacccatggacggaggaagagcatcgaaggtttttaattggtctccagaaattgggtaaaggagactggcgagggatagctcgtgactttgtgactacaaggactcctactcaagtggcaagccatgcccagaagtattatatccggcagagtaatgctggccgaagaaagaggcgctccagcctttttgacatggctccagatatggtttgtcttctctatgatgttgcttctgcacattcattgcactccgttcaaatatccggctcgtgcatgttttaagatgttttcttagctcatgctgacatatgctttaaccatgcactagtgatgattacatgataagggccattcctcttagacctttgggacacatcaaatg

SEQ ID NO: 1967 - DNA, 373 bp, Eucalyptus grandis
cttgaaacttctccgctcttctcttctctctcttgaaaggaaggatgagaaaaccttgttgtgacaagcaagacacaaacaaaggagcatggtcgaagcaagaagaccagaagctcatcgactacattcgcaagcacggcgaaggatgttggcgaactcttcctaaggctgccggtctcctccgttgcgggaagagttgtaggctaagatggataaactatttgcggcctgacctcaaaagaggcaactttgctgaggatgaagaggatcttatcatcaagcttcatgctctcctaggcaaccgatggtcgctaattgctgggagattgcccggacggacagacaatgaagtgaagaactattggaactcaca

SEQ ID NO: 1968 - DNA, 197 bp, Eucalyptus grandis
ggtcgcccgaggaagacgagaagctcttcaactacatcacccgattcggcgtcggctgctggagctctgtaccgaagctcgccggactccagagatgtggaaagagttgcaggttgaggtggataaactacctgaggcctgacctcaagagggggatgttctctcaagaagaggaggatctcattgtcagtctccac

SEQ ID NO: 1969 - DNA, 365 bp, Pinus radiata
gcaaaatcttatttgggttcccttacagaaactatacagtccctgaatgctgagcttgaaagaactagatcggagttggttgaagcaaagaagagagaggaagagattatttcaaaagaagctgaaagagtagagaagaataagagagaagtggaaaatctggaactcaatcttctgcaaactactgcagaagctgggcgagctaaactggaactagagactgcttatgaagaggtgcagagcgcaagacttgaaactgcgcaattgagggctgctttggaagccacagagggaaaatttgaagcaatgctgagtgagactaggttggaggcagagcatgtcaaaggagctattgagaagtataa

SEQ ID NO: 1970 - DNA, 260 bp, Pinus radiata
gaaatattggtgactcaaatagagcaacttcaaagaaaggaacggatgtttagcgaagagaataattttctccgaaagcggattgtcgatccccattccgttttgacaactcctgcaagtggatctggaagcctccaaagaagtgaagtcgagactcaactggttatgagaccgcccagttcaaatgctgattttctttttaatagttctcattgataatcactgtattcatatctttgttattaatttattatgaaatg

SEQ ID NO: 1971 - DNA, 332 bp, Pinus radiata
tctctctggtgtggggggcactcaaaatggggaagacgaagatggagattaaacgcattcaaaaccctagccgccgccaggttactttctcgaaacgcaagaacggattgctaaaaaaggcattcgagctttctgttctctgcgatgctgaagtcgccctgatcattttctcggaaactggcaagatctgcgagtttgcaagccacgacgacatggcaacaatactggaaaaatatcgaatatacacggaaacacatggaaacatggagtcctcgtcggtccaaagcgtgaagattggtgaatcacaactcaaagcgttgcgtgagaagatg

SEQ ID NO: 1972 - DNA, 413 bp, Pinus radiata
cttcgaggtgctaatggctgcacaataccttcaattggattgacaagcatagaacgcgtggaagttcagactcaactggtcatgagacctccacatgccacagagatggacgacaactttatggatgttgacaacgtgccactatctggatgatgtttttctgtttctgttacataatatggccactgatgacaccatactttattttggtatttgctttaaaaatgactctttctttcactgacttttgatggactgtatgatagttgatttttggtcctcatactttagcaaatggttatgggtacctgttttggcccgaggccttggaggatctactctctatatgttactgttttactttttacatttgtgctcactgactcatatgatggacttgcccacatatgatg

SEQ ID NO: 1973 - DNA, 521 bp, Pinus radiata
agaagatgggagcttggtgatctgtgaaagatctctctctgcggctcaaggtatgcctatggtatcacagtctcaaagctttgtgcatggtgaactcttatctagtgggtatttgatccgaccctgtgaaggcagaggagcattagtcatcatggttgatcacaggaacttagaggcttcaagtgtccctgaagcacttcgtcccttatatgagtcatctacattctttgcacagaagatgacagttgaggcttcttatcatcttcaaggtaaagttcaaccggaaatgatttccttatcaaaaaaactccaacagccatgtaatgtacggtcatacagtcaacggctttgcagaggctttaatgaggcagtcaacacattacctgatgatggctggatgtcattgtccaaagatgggctgggggatgtcactatttgtgtaaagtctttgtcaaattgccgaaaccaaatgtcatcgtcaaatagcctatgttcaacagacatgggcatcttgagtgaaa

SEQ ID NO: 1974 - DNA, 461 bp, Pinus radiata
gaaaatgaaagccttcgagctcgtttaaggcatatgaatggcgatgacatcaattcgttgaagcttcccgaactcttccatctcgaacagcagcttgaaacggccgcaacccaagttcgaagaagaaaggatcaagttttagacaacgaaaaaatcaagcgaaggaacaagatgcgccgtaaggaagacgagaacatcattcttcacgaaatgcttgaccagcaccatggacaaatggaggaggataacgctcagattaatttcctattttgccaaccattaaatagatcggatactactttccctgcatcactactccgcctgcaaccaaatcagccaaatttgcaggatattggatattaattactgaacggaccatctgtgtgcatcataatgagaaggtcatggacttctcagtaacagtcaattatgaaaattcgaagtttgtgaggaaaaaaaaa

SEQ ID NO: 1975 - DNA, 499 bp, Pinus radiata
tgagcccccaggtggagcaccgacctttcagcccacatgaagacgccaccatcatacaagcccatgcgcggcatggcaacaagtgggctacgattgcccgcctcctacccgggcgcaccgacaacgctatcaagaaccactggaactcgactctgcgacgtcgctatcatggcgagaaagaccagagcaacgggctagctgtgaacttggagtcggcagctgaggacaaagaaacgatgactccgatgacacctgtcacagccacggcaacggcaacggcaacggcaatgccagtggctttagtgttcccaacggctgcagacaacgtcaggaagcggagcaacagtagctgcagcgctaatgacaatccaggagatgccgaggtcgaatcctgtaggcttaagaggctcaatttttctgaatccccatctagttctgaaaatattaataataataacaataatgaagaagctgttagtggccattgcaattcggccgc

SEQ ID NO: 1976 - DNA, 419 bp, Pinus radiata; identical to SEQ ID NO: 399

SEQ ID NO: 1977 - DNA, 459 bp, Pinus radiata
gcaagctggcctccagcgttgcgggaagagttgcaggcttcggtggatcaactacttgagaccagatctgaagcgaggcacattctctccgcaggaagaaaatctcattgttgaactgcattcagtcctcgggaacaggtggtctcaaatagcaacacacctgcccggaagaactgataacgagatcaagaacctctggaactcgtgcattaaaaagaagcttaggcaacgaggcatagatcctaacacgcacaggcctctcagcgaggtgaatgccgaggcaggggattctaagaacgataacagcaataaagaagtcgaaactcaggcagccatggacgaatctcatgtttctgcagggaacgaattcaagcatctgaatgcaattcctagggctgatacggccaatcctaaattctttcatgttcccgttgaggacaacactttgattgctagcga

SEQ ID NO: 1978 - DNA, 331 bp, Pinus radiata
ggagagtgcaccaccgagatccacgcagtcgaagagaaagagaaatctgcaggaggagttgaaaatgaggtgcacacgatggcaaggtctcccattttcctccaaaccaaaagttaaaaagggtctctggtcgcctgaggaagatgagaaactcatcaattatatgatgaagaacggccttctcggctgctcctggagctatgtggccaagcagattggtctgcagagatgcggaaagagttgcagactgagatggactaactacttacgtcctggccttaagcggggtgcaatttcgcctgaggaggagcaattgatcatacacttacag

SEQ ID NO: 1979 - DNA, 375 bp, Pinus radiata
gttctatcaaacttcttatccaccatacccatttccattagacggctgaattctcagatccaatttgttccagccctctagcgacagaagaagatgggaagagcaccctgttgtgacaaggcaaatgtcaaaaaaggaccttggtcaccagaagaagacacaaaactcaaggcgtttattgaacagcatggcactggtggcaattggattgctcttccacagaaagctggtctgaaaaggtgtggaaagagctgcaggcttagatggttgaactatttgaggccagatataaggcatggtggtttctcagaagatgaagataacatcatttgtagcctctatgcaagcattggaagcatggtgtctataattgca

SEQ ID NO: 1980 - DNA, 749 bp, Pinus radiata; identical to SEQ ID NO: 361

SEQ ID NO: 1981 - DNA, 339 bp, Pinus radiata
cttggctggggaagacaacccgctgcattacggacatttagccagagattgtgcaagggtttcaatgaggcagttaatggcttcacagatgatggatggtctttgatgggtaacgacggaatggaggatgtaactattctcgtcaattcatctccaagcaaactgttcggtcaacagtttgcttcttccgatgggcttcctgctcttggtgggggcatcctatgtgccaaggcttctatgctattacagaatgttcctccagcattgcttgttcgtttcttgcgagaacatcgatcagaatgggcagatagtaatattgatgcctattcagcagcctct

SEQ ID NO: 1982 - DNA, 373 bp, Pinus radiata
ggattccgacccttccggctaaagctgcttcatttctgtgtgtattgaagatggggagatctccctgctgtgaaaaagctcatacaaacaaaggggcgtggaccaaagaagaggacgatcgcctcatcgcccacattcgaactcacggcgaaggttgctggcgctcgcttcccaaggccgcagggctgatgcgctgcgggaagagctgcaggctccgatggataaactacctgcgtcctgatctgaagcgtggaaacttctcagaagaagaagacgaactcatcatcaaactccactccctactcggcaacaagtggtctcttattgcaggcagattgcccgggcggacggacaacgagataaagaactactg

SEQ ID NO: 1983 - DNA, 404 bp, Pinus radiata
aggcaataagtgttattattgagaacttgactgtggctgagattttcagggatggaccgttcaaactctgcgactggagaagaagatgtactgtcaagatgcagggaaagaaaacgtttcatgaagctggcaattgagaacaggtataaactagcaacagctcatgtggcttacatggattctcttaggcgtatgggcaccggtcttcggctttttgctgaaggcgaaacgatgtcggagtcttcctattccacatcacccatagggacttctgaacttgctgttgtcttgcctgagaaatccgtatccccatctccatttccatcctcatccccttcactttctcaacctcaaagtccccgttcagagagagcagaatctcgatctccactcgacagcttctc

SEQ ID NO: 1984 - DNA, 332 bp, Pinus radiata
cggacggcttggttcaaaactctcgtgaaagaaaaaaaggcgttccttggacggaagaagaacataaaatgtttttattagggcttcacaaattgggaaaaggcgactggagaggtatttccagaaactttgtcacttccagaactcctactcaagttgctagccacgcacaaaaatattttcttaggcagagtaatttgaacaaaaggaaacgaaggtcgagcctgttcgatatatccactgattcgatggaagattgctatcaaggaatcccggagctgtcaccggtgatgcacgatctcagcctgggccagaattcatctctgacctct

SEQ ID NO: 1985 - DNA, 526 bp, Pinus radiata
ctcctctcccgtctccaaacccaagctaaggaaaggcctctggtcgcctgaggaggatgataaactcatcaactacatgatgaaaaacggccagggttgctggagcgatgtcgccaagcaagctggtctgcagagatgcggaaaaagctgtaggctgaggtggattaactatttaaggcccgacctcaaacgcggtgcattttcaccccaggaagaacaattgatcatacacttgcattccattctcggcaacaggtggtctcagattgcagcccgtttgcccggacgtacggacaacgagatcaagaatttctggaactcctgcataaagaagaagttgaaacacctttcggcctccaccaacaacagtaaatctatctctgcacctaatcgtaccagtaccatgaattcatcgatcacgcccttttctgaatcgtctgccgagccattggaggtcatggcaacaaggtatcagccatcgaatgcttttaatcatgaagtgcccactgcagaaaatcaagttttg

SEQ ID NO: 1986 - DNA, 366 bp, Pinus radiata
atcagactcacatcaaacgaaactggagccgtgaagggttagttgcggtgttaaattctaggacagctttccgtattagaaagaggcgccctttacgggagtcggcaccaaaccagagtggagagaaataatgggtagggctccctgctgcgaaaaggttgggctcaagaagggcccctggacgccggaggaagatcaaaagctcctcgcttacatacaggagcacggccatggcagctggagggctctgcctcagaaagctgggttgctaagatgcgggaaaagctgcagattgcgttggactaactatctaagaccagatatcaagcggggaaagttcaacccacaggaagaacagacaattat

SEQ ID NO: 1987 - DNA, 476 bp, Pinus radiata
ccgaactccccgctgtgatcaaatgggattaaaaaagggaccctggacacctgaagaagatcaaatactcatctcctatatcaacaagcatggtcatggaaattggcgtgcgctgcccaagcaagcaggacttatgcgatgtggaaagagttgtcgcctgcggtggacaaactatctgagacctgacataaaacgtgggaacttcagtctcaaggaagagcagactattattcatctgcatcaaatccttgggaaccgatggtcagctattgcctcacacctccccggaagaacagataatgagataaaaaatgtatggaacactcatttgaaaaaacgcctcctgcaaattggggtagacccagtaacccacgcgcctagaggatacaatgtatctaactgttacaccgctgtgaatatccgggaccatcatggcgagcaggccgatcatcagctccaaagccatgtctgcgttt

SEQ ID NO: 1988 - DNA, 151 bp, Pinus radiata
ggacacctgaggaagatcgaattcttatctcctatataaaaaggaatggccatggaaagtggcttgcactgccgaaacaagcaggacttagccgatgcgggaagagttgtcgactgcggtggacaaactatctgagacccaacataaaacg

SEQ ID NO: 1989 - DNA, 461 bp, Pinus radiata
gtaacccatcaggagttctcttctgtccaacccccctaactctccacttcacagatctcatgagacttaacctgttctaacgttgcagggcaataaccctctttgtctcttgttctgtattttttgctttttgaccacagagcaggttcaacaagcttgtacaaaggacgcactgaaaatgaaggatttttactgcagcttatgttaaggtttattttatataaacgatgggaactggggaagaagcaacgccaactaagcctgctgccaaaccatcttcctcctcccaggagacaccgacaacacctgtttatccagattgggcagctgctttccaggcatattatggtccaggtgctaccccacctcctcctgccttttttgcttcaacagtgggatctgcaccaactccacatccatacatgtggggtggacagccgttgatgccaccttatgggact

SEQ ID NO: 1990 - DNA, 418 bp, Pinus radiata; identical to SEQ ID NO: 344

SEQ ID NO: 1991 - DNA, 321 bp, Pinus radiata
actaaagcagctataaagagactgcagtctcagataatggttgcattccaggcagttgatacaacttctgcagcaattctgaaattgagagaagatgaactctatcctcaactcgtggagctatctaaagggctaatgcagatgtggagggccatgtatgaatgccaccaggtccaaaatcatattgtccaacaggtgaggcatttgggcaatctggcaagcgcagaggccacaagtagttaccatcagcaggcaaccattcaattggaagctcaggtgactgcttggtatgacagtttttgtagaatgataacgagccag

SEQ ID NO: 1992 - DNA, 390 bp, Pinus radiata
gagaaaacctaagtcctctcgcagcaagcaagccacgcattccctctctacgactcgggtttggtgtagaaggcagagatttactttgtttctgcttgtttgtcggtcttcaccttcaccttcagacaacatttgtctgaaccgcggaactagctcttgaaatattgaaacccacctaaatcgcaggggattggtggatgttagcagtggtcacagagcggtagagctagggaaaatccatatacaactacatacacagatacccattatcagccatgggcgctccgaagcaaaaatggacatcagaagaagaaggtgctctgcgagcgggcgtggagaagtatggcgccggcaagtggcagaccattctcaaggacccagagttcgcct

SEQ ID NO: 1993 - DNA, 476 bp, Pinus radiata
gcagtggtcatatggatgggggatccggagaggaccaagatgccgccgatcaagatcacgatcacgatcacgatcatgatcacgagcagcagcagacgcggaggaaacgttaccacagacacactgctcgtcaaattcaggagatggaagcgttgtttaaggagtgtccacatcctgatgacaaacaaaggcagcggctcagcattgaattgggccttaagccgcggcaggtgaaattctggtttcaaaatcggcgtactcagatgaaggctcaacaggatcgctcagacaacgccattctccgtgcagagaatgaaaatctgcggaacgagaacgtagcactccgagaagcaattaaaaatggtgcttgtccaaactgcggagggtctacatcgctgggagagatgcctggattcgacgaacaccatttccgtatagagaatacgcgcttaaaggaggagcttgatcgagtgtct

SEQ ID NO: 1994 - DNA, 429 bp, Pinus radiata
gataaactgagtgagcaaaattactcagaaagaaggaagagcagaacaattcgcccggaggaatgggttgcacacaagggcaacgacaaggggaatgggaagggaaaggcgtcccctcgaattcctcaaggcgaagtctaagaaaaggtctctggtcaccggatgaagatatagaacttaccacctatatcatgagaaagggcctcatgggctgctggaactatatcgccaagcaggctggtctgcagagatgtggaaagagttgcaggctgagatggattaactacttgcgacctggtcttaaacgttgtgcaatttcaccccaagaagagcgactgataatacagttacaatccagtctcggtaacaggtggtctcaaatcgcggcacatttaccgggacgcacagacaatgaggtcaagaattact

SEQ ID NO: 1995 - DNA, 321 bp, Pinus radiata
agcgcgtctctgtgaaaatggggagatctccgtgctgtgagaaggctcacaccaacaaaggtgcctggacccaacaagaagatacccgccttgtcgcccacattcgagcccatgggcaaggcggctggagctcgcttcccaaggcagcaggactgctgcgctgtgggaagagttgcaggcagcgatggataaactacctgcatccagatctgaagcggagtaacttttcagaggaagaagatgaactcatcgtcagactccattcgctcctgggaaacaagtggtctcttattgcggggagattgccggggaggacagaca

SEQ ID NO: 1996 - DNA, 402 bp, Pinus radiata
ccgcctcctacccgggcgcaccgacaacgctatcaagaaccactggaactcgactctgcgacgtcgctatcatggcgagaaagaccagagcaacgggctagctgtgaacttggagtcggcagctgaggacaaagaaacgatgactccgatgacacctgtcacagccacggcaacggcaacggcaacggcaatgccagtggctttagtgttcccaacggctgcagacaacgtcaggaagcggagcaacagtagctgcagcgctaatgacaatccaggagatgccgaggtcgaatcctgtaggcttaagaggctcaatttttctgaatccccatctagttctgaaaatattaataataataacaataatgaagaagctgttagtggccattgcaattcggccgc

SEQ ID NO: 1997 - DNA, 375 bp, Pinus radiata
ttagcttgcagaaaatgaggtgcaaaacagggcaggcacaaggcgtattggaagttgaaggcactcaccctgctccttccaaaccaaagttaagaaaaggtctctggtcacctgttgaagataaccagctcaccaactatatcctgagaagaggcctcgtcggctgctggaactatgtggccaagcaggctggtctgcaaagaaccggaaaaagttgtaggctgagatggattaactacttacgccctggccttaaacgtcatccaatttcacgccaagaagagcagctcatcatagaattacaatccattctcggtaacaggtggtctcaaattgcggcacagttgccgggacgcacggacattgagatcaaga

SEQ ID NO: 1998 - DNA, 466 bp, Pinus radiata
acaacagcttgaatctagtcgaataaagctgaaacaaattgaacaagagcttgagcgagtgaagcaacagggaatttccatcaatggacatttgggcgatcataatggatcaggggctgctgcatttgatatggaatatggccgttgggttgaagaacaaaacagacaagcccgtgagctcagggcttctttacaagcacacctgacagatagcgaactttgtgttctggtggataatgctatagctcattatgatgaactctttcgtatgaagggtgctgcttccaagttggatgttttccatcttatgtcaggcatgtggaaaactcctactgagcgttgttttatgtggatgggaggttttcggccatcagagcttctgaagattcttactccacaaattgagcctttaacagaacagcaatcattcgcagtatctagcttgaaactgtcatcacagcaggca

SEQ ID NO: 1999 - DNA, 243 bp, Pinus radiata; identical to SEQ ID NO: 368

SEQ ID NO: 2000 - DNA, 642 bp, Pinus radiata
cgagcgcgaaagactgaaatattggtgactgaaatagagcaacttcaaagaaaggaatggatattaagcgaggagaatgctttcctcggcaaaaagttcgtgcatcctcattccgtttcgaaaactcctggaagtgaatcgggaagcatccaaaacagtgaagtcgagacgcaactggttatgagaccgccatgtacaaatgctcattttcttattaatagttctcattgataatcaatgtattcgtaactgtgttatcaatttattatgaaaattttatattaataaaaggtaaagctgcttctcatatcgcacctaattgttcaccacgtccaaaaaaaggctcttgccaagtgaactaaatgttttttgaaccgaagtctgtcttccaaactcagtatgtaagcttgctatgaatacatactttaaaggttttgtattagcattacgagcggagttttcctcattcatccgatgagcatgaagagtgaggagtataatattgacgcatgtggagaatttaatgttgcatatactcctacgtgtatatatgtgatgttttatatatatatatatatatatataatatcgatttgaatctataaaattttaaattatatatttagtttaaaaaaaaaaaaa

SEQ ID NO: 2001 - DNA, 485 bp, Eucalyptus grandis
gagagagtctgcaaactgcgcgtcccgcgtcgccgatcgccgggagaatcgccgccggcgagatatggggaaccagaagctgaagtggacgaaggaggaggaggaggcgctcctcgccggaatcgccaagcacggcgccggcaagtggaagaacatcctcaaggaccccgaattcgcccccgccctcgtcaatcgctccaacatcgacctcaaggacaagtggcgtaacttgagcgtcggtacttctggacaaggttctagagataaacaaaggctgtcaaaagtgaaaagtctgatggccgctcctcagtccagtaccgtgcctctaaatccacaagctcatgctgcatctactgatgttgcattggtcaattcttcaaatagctttcaagatggcaaaaattattcactgtgggtatctgtgctccttttccttttcagtaacggcaatcttttttacttctatcctttgttatcctttctgt

SEQ ID NO: 2002 - DNA, 356 bp, Eucalyptus grandis
cgactcgtcagtcagctcgtgcactccttgcaattcatgattatttctcccgacttcgggcccttagttccctctggcttgcccgtccaagagaatgaagaggtcatggtctatgcaggctgacatgtacattggtgatctttaggaagctatcagttttgaagtagtttcggacctagaactggtttatttctagttttcttcattttttttttctttggctataattattttttctttcttagacacgaagtcacagagaattgattgatggtatgctaagctatcataggttgggattgcattgttctcattgaagatactgctaattgtgtaggcactcctgttcattagtc

SEQ ID NO: 2003 - DNA, 713 bp, Eucalyptus grandis
tctccatccaaattcccaccttcctcccttcctccctttccccctttccttccttctgcaccgaaggaagcccccgcttcgcaagccacctctcggtaaagttcgctcctttttgggtcggcgaatcttgggtcgatcgatggcttcgaggaaggaggtggatcggatcaagggaccgtggagccccgaggaggacgaggccctccgcctcctggtgcagaagcacggcccccggaactggtccctcatcagcaagtccatccccgggcggtccggcaagtcgtgccgcctccggtggtgcaaccagctctccccgcaggtggagcaccgggccttcaccccggaggaggacgacatcatcgtccgcgcccacgcccggttcggcaacaagtgggccaccatcgcccgcctcctctccgggcgcaccgacaatgccatcaagaaccactggaactccaccctcaagcgcaagtgctcccccccgctctccccgctcgccgaggaagggaacaacagggcgttcgacgctgccgcggggtacgacggggacttgagcccgcgggagcggccggcgaagcggtcggcctccgccgggccttgcctgagccccggcagcccgtccggatccggcatgagcgactccagcgtgcacttcgtgtaccggcccgtcgcgaagaccggccccgtggtgcccccgacggtcgaggcgacgg

SEQ ID NO: 2004 - DNA, 341 bp, Eucalyptus grandis
acaggttgctcaattaagagttgagaattctactttactgaaacgtctctcggacataagccagaagtacaatgtagcagctgttgacaacagagttttgaaagctgatgtcgaaaccttgagagcaaaggtgaagatggctgaagagacggttaaaagagtaaccggactgaacccaatgctgcatgtgatgtccgacatgtcttctgtgggtgtgccaccatttgatggtagtccttctgatacatcagcggatgctgcagttcctgtgcgagatgacccaaagcaccaattctatcaaaccaattctagtaaccccgcatcatctgctgacgatatga

SEQ ID NO: 2005 - DNA, 1403 bp, Eucalyptus grandis
ttctttcttcaccctctgtgcatgaattttcttgggccatgctcatgcattctcctcctctttcttcatcaccatcgtcatcgtctctgactttgatgggttggcgagggggggagctgagggagagggagaggagaggagagaggagcggctgtgcgttcgcgtgcagggctgcacgaggtgttctcgtttcgggcgcgggcgctctgcttccatggctgcttttaagtaagacgccaaaagaaaacctttttgctctctcgagtgtcatgaactcgcactgaaagtgcgcgccgaaccgagaagaagaagaagaagaagaagaagaagaaagagaaaccatccccttagaaaacgcgaaaaagagtaaatagtaaaaagagcaagcttgatcttacttgatctaaaacattaagatccttctctgttcgagagaagtcacagtcccgctttttccagacatgaagagacttggcagctcagattcgttgggtgctttgatgtccatctgcccaccttcagaggaattgcagcacagtccgagaaacggcaaccccatctaccacagcagggacctgcagtccatgctggagctgggcctcgacgaggaaggctgcgtggaggaccagtccgccggcggcggggggcacgtcggcggcgagaagaagcggcggctgagcatcgaccaggtcaaggccctggagaagaacttcgaggtggagaacaagctcgagccggagcggaaggtgaagctggcccaggagctggggctgcagccgcgccaggtggccgtgtggttccagaaccgccgcgcgcggtggaagacgaagcagctggagcgggactacggcgtgctcaagtccagctacgaggcgctcaagctcagctacgacgccctcaagcacgacaacgaggcccttcacaaggagataaaagagctgaaatcgaaactccgggaagaagacgacaaccccgagagcaatctctccgtcaaagaagaggtcatcatccccggccacgacgtgtcggacaagatccgggccgcagacgacggtgacgacgacaccaaacgctctcctccccctccgatcaccgccccgcctcgcgagctgagcttcaacaatggtgggctgaaggacgggtcgtccgacagtgactcgagtgcaattgtgaatgaagagaacgcggcgaccagcagcagcagcccgaaccccgccgtccagagccacggcggcttcttgaaattcatggggtcatcgtcctcttcggcctccccaccgccgtcgccaccggcttccttcggcgggtgcttcagcttccagttccagcgagcgtaccagcctcagcctcagcctcctcatcaccaccaccaccacagtccgtacgtgaagatggaggagcac

SEQ ID NO: 2006 - DNA, 283 bp, Eucalyptus grandis
gagaggtacaagagtgcatgcagtgattcctcacatccacagtccgtttctgacgtgaacactcagttttatcagcaagaagcatccaagcttcggagacagataagagaaatccaggtctcagataggcatcttctaggtgagggtataagtgatttgagcttcaaggatctcaagaatctcgagagcaaattagagaaatcgatcagccgtgttagatcaaagaagaatgagatgctttttgccgagattgagtacatgcagaagaggggccttgtgcagg

SEQ ID NO: 2007 - DNA, 252 bp, Eucalyptus grandis
agagaacaagataaacaggcaggtgaccttcgctaagaggaggaatgggctgctcaagaaggcctatgagctctctgtcctctgcgatgctgaggtcgccctcattatcttctccacccgcggcaagctctatgagttctgcagcagccctagcatgctcaaaacgctcgaccgttaccaaaagtgcagctatggatccgttgaagttaacaaaccctccaaagaactagagaatgcctaccgggagtactt

SEQ ID NO: 2008 - DNA, 386 bp, Eucalyptus grandis
tctagatccaccaccagcagaaggaggtagaagggggagaaggaggagaaggaggaggagatgggtagagggaagatagagatacagaagatagagaacgacacgaacaggcaagtgacctactcgaagcggaggaatggcatcttcaagaaagcccacgagctcaccgtcctctgcgacgctagggtttccatcctcatgctctccggcaacaagaagctccacgagtacatcagccccaccaccacgacaaaaaggatgattgatgattaccagaaggctcttgggatcgatctgtggactacacactacgatagaatgcaagaggagttgaggaaactgaaggaggttaataacaattttcggaaggaaataaggcagatatt

SEQ ID NO: 2009 - DNA, 123 bp, Eucalyptus grandis
gagaaaccttatgggggaagatttggggaccttgaactcgaaggagctcgagcagctcgaacgtcaacttgaggcatcattgaagcatattaggtcaactaagactcagtgcatgctcgatca

SEQ ID NO: 2010 - DNA, 581 bp, Eucalyptus grandis
cttagggctagcttgcttacatcttcaccatcttctgcgtagtttcaacattttagagttgaagaaaaggagaaaaaactaggcaaacttgcgaccatggtttttccaacccaagccacgcccgaggagtccccgcagaggaaaatggggaggggaaagatcgagatcaagcggatcgagaacacgacgaatcggcaagtgactttctgcaagcggcggaatggcctcctcaagaaggcatatgaactctccgttctttgcgaagccgaggtcgccctcatcgtcttctccagccgcggccgcctctatgagtatgccaacgatagtgtcaaagcaaccatcgagaggtacaagaaggcttgctcagattcctccagtagcggatccgtttctgaagctaatgttcagttttatcagcaagaatccgccaagttgcaacaacagattaataacatgcagaacaataacaggcaactggtgggtgactcaattgctgggatgaatatgaaggatatgaagactacggagcaaaaactagaaaaagcaatcgctaaaattcgcgccaaaaagaatgcgatttt

SEQ ID NO: 2011 - DNA, 538 bp, Eucalyptus grandis
tcagcacaaggaacaaatgctggttgaagctaacagagaattaaggaagaagctggaagagagcaatacaagaatccctctccgccttggatgggaagctgaggatcacaataacatttcatacagccgccttcccatgcagtcgcaaggattgatcttccagcccttaggcggcaacccgacattgcagatcgggtacaatcctgcaggctcgaatgaattgaatgtttcggctgccgaccaacatcccaacggattcattcccggatggatgctctgaatcgttccgcaagtgaactgcttgctggaagttccatatcaagtacattttccagtttttgctatgatatatgactcttcttcttctggatgacctatacgaagatccatcattcgtggatattgtccatggacgtaccctaaaaggaaggacagtatgaatccaatctagcttactattttgtataagaataaacatctgtgctgctgatatttggaattcatctatgttatttaatgaaaaaaaaaaaaaaaaaaa

SEQ ID NO: 2012 - DNA, 341 bp, Eucalyptus grandis
aggcagcaaagagctcgagtccttggaaagacagctagatgggtcattgaagcagatcagatcacgaagaactcagtacatgttagataagctgactgatcttcaacatcgggaacagttgctccacgaagcaaacaggaccttgaatcaacggttgatggaaggataccaagtgaatgcgctccagttaaatcaacatgccgaggaagtcggaggatacggtcatccaccgccgccgccactgccgccacagccacttgctcagcctcacagcgaagcttttttcaatcccttggaatgtgaacccactttgcaaatgggataccagcccgatccagtgt

SEQ ID NO: 2013 - DNA, 934 bp, Eucalyptus grandis
gcgccatgacgcggcgatgctcccactgctgcaacaagggccacaactccaggacctgccccgtccgcggcggcggcggggacggcgggggcgcggcggccgccccctcctcctcctccccctccacctcctcctctggcgccgcggcggcggcggcggcctcggcctccggcggcggggtgaagctgttcggggttaggttaacggacgggtcgatcatgaagaagagcgccagcgtggggtgcctgtccgccgcccactaccactcctcgtcctccgccgcggcatccccgaaccccggctcgtccccgatcgacgggagcgacggctacctgtccgacgatcccgcgcccggctcccgctcgtccaatcggcgcgtcgagaggaagaaaggtaacccatggacggaggaagagcatcgaaggtttttaattggtctccagaaattgggtaaaggagactggcgagggatagctcgtgactttgtgactacaaggactcctactcaagtggcaagccatgcccagaagtattatatccggcagagtaatgctggccgaagaaagaggcgctccagcctttttgacatggctccagatatggctactgctgaccaaccctcacatccagaagaaacatttctgcctcctttggtcagacttaacgatgatactaactcaacaacttcaaccagtatgggactcgatttggaaagaacgcctatggagacctcgcacccagaaacatctgaagggggcggtgatgttgcgatggaatcaattgatcaagtacctcttgtaccctgttacttcccatactatttaccactaccctttcccatgtggccgcccaacatggcgcctcctgaagatggaagggtggtggagacatctcatcaccgtgtgctaaagccaatcccagtaattccaaaaga

SEQ ID NO: 2014 - DNA, 372 bp, Eucalyptus grandis
ctgggacacttcttcttcccctcctactttacttgaatcggtcgacaattttatcctgtctccagctagaactggaaaggctgaatcagagtgtctttctccccgtaatagtgggctgctggatgctttagttcacgagtcgaagactatgagcagtgccaaaaataattcacctgaaaaaagtacaaattcatctgctctgacacctggtgatataagcagttccactttggatatttgcaagtctgaatgggaagagtatggtgaccccatttctccaccgggccattctgcaacttcagttttcaatggttgtactcctttgagcactagtggaagctcactggatgaacaaccgtatcccgatacctt

SEQ ID NO: 2015 - DNA, 411 bp, Eucalyptus grandis
gcacataagaaggaagctcttgaaccgagggatcgatccggcgacgcaccggccattgaatgagcccgcccaagacgcaaccactatttcgttcgcagcggctccgtcaaaacaagaaccgcgagacgacgccatcgccgccgcgctcggctacaagaacgagaacaacccgacaacaacggcagcaacggttcaagaaaagtgtcccgacttaaatcttgagctcagaataagccctccttgccagcagcagcatcagcctgatgcgtcgatgggaatggttgagggaaatcactgctttgcctgcagcctggggttgcagaacagcaaggagtgcagttgcaggagaggagcgagcgggggaagcagcgcccatggcggctacgactttttggggttgaagacgagccg

SEQ ID NO: 2016 - DNA, 356 bp, Eucalyptus grandis
ctcgtccccaaggtttttttgcggaagtatggagttcccgagtgaattttcagaggcctcttcacagaagagaatcggggggagagggaaaatagagatcaaacggatcgagaacacgacgaaccggcaggtcaccttttgtaaacgccggaacgggttgttgaagaaggcttatgagctatcggtgttgtgcgatgctgaagtggcgcttattgtcttctcgagccgtggcaggctctatgaatatgctaacaacagtgtcagaggaacaattgagaggtacaagaaagcaagcagtgattcctccacatcccacagtccgtttcctgaagtggaacactccagttttatccagc

SEQ ID NO: 2017 - DNA, 356 bp, Eucalyptus grandis
agagagtaatggggagagggagagtggagctgaagaggatagagaacaagatcaacaggcaggtgaccttctcaaagaggaggaatgggctgttgaagaaggcctatgagctctctgtgctgtgtgatgttgaggtcgcgctcctcatcttctccagccgtggcaagctctatgagtttggcagcgctggcccttctggcataaataagacgcttgaacgataccaacgtgacaacttcactcctcaagacaacgttgctgaacatgagacacaacagaactggtttcaagagatatcaaaattgaaggcaaaatatgaactcttcaacaaactccagaagcatttgcttggaaaa

SEQ ID NO: 2018 - DNA, 495 bp, Eucalyptus grandis
caaggaagcaacagtcttgctgcaaccagaagctagttcaaactagtggaaggttgtgggcgcttccagtgctttgtaaagccaccccaagaaagcaaaaaccatcgttgccctaccacaaagttcgcagcgttcgtcgacgagaggagtctgttgatttatccaagtgttgtttaaagtagatctcctttttcggtgaacatggctcgtggaaaagttcagatgaagcggatcgagaacccggtgcaccggcaggtcaccttctgcaagcgccgcgcggggctcctcaaaaaggccaaggagctctccgttctctgtgacgctgacatcggcctcttcattttctccccccacggcaagctctatgagctggccaccaaaggaaccatgaaggggctgatcgagaggtacatgaagaccacccaaagccaagctgctctgaccgaggaagccacaccgagccaaccactggatgccaaagaagagattaacata

SEQ ID NO: 2019 - DNA, 613 bp, Eucalyptus grandis
agaaagagagacagagatatgggaagagggaaagtagagctgaagaggatagagaacaaaatcaacaggcaagtaacatttgcgaagagaagaaatgggcttctcaagaaagcttatgagctctctgttctctgtgatgctgaggttgcgctcatcattttctccaaccgtggcaagctctatgaattctgcagcagttctagcatgatgaaaacaattgagaagtaccagaagtgcagctatggttcacttgagaccaactgctccatcaatgagatgcagaacagctaccaggattatttgaagctaaaaacaagagtggaggtcctccaacgatctcagagaaacctccttggggaagagttgggtcccctaaactcgaaggagctggagcaacttgagcaccagttggagaattctctgaagcaaattcggtctgcaaagacccaattcatgtttgatcaactggctcatcttcagcacaaggaacaaatgctggttgaagctaacagagaattaaggaagaagctggaagagagcaatacaagaatccctctccgccttggatgggaagctgaggatcacaataacatttcatacagccgccttcccc

SEQ ID NO: 2020 - DNA, 564 bp, Eucalyptus grandis
atccccttgccttgttcaactctctctttctccccctccttctactgcgaatatcatatccgaagctttggcttcgacgacgaggctcacggaaattagagaaccatgaggaagccttgctgcgacaagcgggacaccaacaagggggcgtggtccaagcaagaggaccagaagctcatcgattacattcaaaagcacggcgagggtagctggcgaactcttcctcaagccgccggtctgctccgttgcggcaagagttgccggctgagatggataaactatctgaggccggacctcaagagaggcaacttcgcagaggatgaggaagatctcatcatcaaacttcatgcactcctcggcaaccggtggtcgcttatagctggaaggttgccgggacgtacagataacgaagtcaagaactattggaattctcacctaaggaggaaactcctaaagatggggattgaccccaacaatcaccggttgaaccaaaatctccctcgctctcaaacccggatgcctcggcagcacttcctcatccagtatgaagaccacatgaccctg

SEQ ID NO: 2021 - DNA, 410 bp, Eucalyptus grandis
tggaagctctgcagcaatctctcgtggacacactttcttcgaccacactgagtcctactggttcaggcaacgtcgcagaatacatgggccaaatggctattgcgatgggaaagttggccactctcgaaaacttcgttcaccaggctgacctcttgagacagcagacgctccaacagatgcatcggatattaaccacccgccaagcagcccgcgctcttctcgtcatcaatgactacatctcacgtctccgagctctaagttcattatggttagctcgtcctaggactgaaaacatctgttctgctaaactcttctgatgtaatcgatagttttgattgaaattaacgtttctagtggggatccatttactgcgactgtagcgattcgggccacatttatataaaagctat

SEQ ID NO: 2022 - DNA, 328 bp, Eucalyptus grandis
cgacccgttgatgaagccctggcagatcccatgtccgatacaacccataatagcgtccgcagacctgtttgagtgctgatgtatcgattgctgttgcaaatgtggaactagcgctttggattttagtctctttacctctgtgtttgatgtgaatattgtccgatgtctctgatgttcttacttcatcttgttggcagtggtaaaatgtcagtttcgtgtctgttgactggattggctctcttttttgtacaagggggtgtcgtttttcaccctcattagcttgtgaaatttgcatgatgatgaatggttgtaacaaacctatattagc

SEQ ID NO: 2023 - DNA, 380 bp, Eucalyptus grandis
ccaacaagtcatatatcctcgacttgctcccagtggaacgccttccattacttaatcgctgctagcgctaaacccccctcactcttcaccagcaaaaacgccttttctcgcacacaaatgggtcgtcgtaaaattgaaatacagccaataacgcacgagcgaaaccgatctgtcacattcctcaagcgcaagaacgggctgttcaagaaagcgtatgagctcggtgtgctctgctctgtcgacgtcgctgttatcatctttgaggatcgcccagggcacagccccaagctctaccagtactcgtctcgcggtatccaggatattgtgcagaggcatcttcatcacgacggcgagactgataaccgtggccctggggactt

SEQ ID NO: 2024 - DNA, 322 bp, Eucalyptus grandis
cgagacagaaccttcttggtggggcttgagaagcttgggaagggtgattggagaggcatctctaggagctatgtgaccacaagaacaccggcccaggttgcaagtcatgctcagaaatatttcctccggcaagtgagcttcaacaagaaaaagcggcgctcgagcctctttgacatggtaaaaaatcagtgctcctataaactattaccatcatatcggctatcatcaattagtttgatggggtttgataaattcttattgtataaggttgatgtcaaaaccgcggcgggtgatcgtttaggcagtttgacggccaagccga

SEQ ID NO: 2025 - DNA, 387 bp, Eucalyptus grandis
gaaagaagggagtagagaaggaggtgacataaatttgccacagaggcaacggactttgggagagatgacattggaggagttcctagtgagagccggcgttgtgagggaggacacacaaatgatggcaaggcctggcgacaatggagttcatgaagaaatgtcacaattcactagtaatggtctcgccagtagtgcggctgctggaaacgatttcatattctctagtaagcctgctggttcatcgttagattttattggaactagacctactcagctacagcaacaaccacagccacagccgcttgaaccaccggctccgctttttccaaagccggaaactgtgtcatttgcaacctccgtgcatctaccaaatacagcttcatatag

SEQ ID NO: 2026 - DNA, 450 bp, Eucalyptus grandis
gcgaatgctcctctccggattgccatgaactccaacgcttcctccaacccccagtcgatggccacctccacgacgtcggcgaccacgccggcggcgggcggcgacggcggcaagaaggtcaggaagccctacacgatcaccaagtccagggagagctggaccgaggaggagcacgacaagttcctcgaggccctccagctgtttgaccgcgattggaagaaaattgaggattttgtgggctcaaagactgtcattcagatccgaagccatgcccagaaatacttcttgaaagtccaaaagaatggggcagttgcacatgttccacctcctcgtcctaaacgcaaagctgctcatccctaccctcaaaaggcatcgaaaaatgttttagtgccgctgcaagcatccatggcccagccttcttcaacaaatcctgcttttacaattacacct

SEQ ID NO: 2027 - DNA, 786 bp, Eucalyptus grandis
ccaaacatccatccgtccatcagctctaaactttaattgtaatcacatcgtcctttctcgacaccaactgggtcaaatgcttaaaaaaaggaaaaggaaaagagaaagatgacgtttccttccttcctctccaccaccgctctcttctatttatctcctctctctctttcttcctccatgagcggtgctcttcaggttggatgcaccacttcaactcaacctcaatacataaacgtcgtgttgggaaaaggataaaggcagggagaaggagatggggaggtcaccgtgttgcgagagcgagcacatgaacaaaggggcatggagcaaggaggaggacgagcgcctcatcgcctacatcaagcgccacggcgaaggctgctggcgatcccttccaaaagcagccggcctgctgcgctgcggcaagagctgtcgcttgaggtggatcaactacttgaggccagatttgaagcgtggtaacttctccgacgaagaagacgagctcattatcaccctccacagcctcctcggcaacaagtggtcgctgatagcggcacggttgccgggaaggacagacaacgagattaagaactactggaacacccacatcaagagaaagcttcacgcacgcgggatcgatccccaaacccaccgtcctcttcgactacaccagcactgctggtgctggtgctgctgccacttcacactatctgttctaacgctaacaacagcggcaacaaggccacgcctcactcgacgacttgtgaagaattatcatcatcatcaaca

SEQ ID NO: 2028 - DNA, 476 bp, Eucalyptus grandis
agaagcgctgagttcttggtcaaagtctagcagtttcgggttctccatcaatcgagtcggagtgggagaaaatgagcacaaatggtttgctgaagtttgaccaaagtctttagtgagatggttgctgtctcccgttctcctccaaacagatgtctgatcaaataacttacttgaccgccagtatgaactctcctttagcccagcttgttaacccaagaaggatgcacacctacgagccatttgaccagttccccatgtggggagacaccttcaaagctgacaaggtcaaaaatctcgaggcatcgtcatctgtgatcgtgcatgcagtagatgatggattggacaagaagtttgaatatgtttctcatgaatcggcagaaaattccagctccaggagcgatcaagaagcaaatagacctgacaaggtacagagacgtctagcacagaaccgtgaagctgctcgaaaaagccgtctg

SEQ ID NO: 2029 - DNA, 535 bp, Eucalyptus grandis
cagccggatgtaccttagtgtactgaatagcctaaagccatgttcctatcagatgttaacttgcatatggaaatgaatattacaacatgcgcgctttcttgagttttttttccctctgtagttgcacgcgaagaagcgctgagttcttggtcaaagtctagcagtttccgggtctccatcaatcgagtcggagtgggaggtatgaactctcctttagcccagcttgttaacccaagaaggatgcacacctacgagccatttgaccagttccccatgtggggagacaccttcaaagctgacaaggttaaaaatcttgaggcatcgtcatctgtgattgtgcatgcagtagatgatggattggacaagaagtttgaatatgtttctcatgaatcggcagaaaattccagctccaggagcgatcaagaagcaaatagacctgacaaggtacagagacgtctagcacagaaccgtgaagctgctcgaaaaagccgtctgcggaagaagaaatatgtacaacaactagaatcaagccgct

SEQ ID NO: 2030 - DNA, 723 bp, Eucalyptus grandis
gtgaggcgctgcctccaccaccaccgccgtccccaccgccgccgccgccaccaccaccaccaccaccaccaccaccttatactgtacaaataatcccttggcctcggccgttatagcctcttactcaaaaatcagtttttacccttttctgttgcgtagtcgtagttttgggccaggggttctattcggtatatgtagagaagtcagtgggcgaaaccgagcgtcgagcggtcggccatggcttcctcttcttctgtagcttccgcgaggaaggacgcggatcggatcaaggggccgtggagccccgaggaggacgaggcgctgcagaggctggtccagagctacggcccccgcaactggtccctgatcagcaagtccatcccggggcggtccggcaagtcgtgccggctccggtggtgcaaccagctctcgccccaggtggagcaccgccccttcaccccggaggaggacgaggccatcgtccgcgcccacgccaggttcggcaacaagtgggccaccatcgctcgcctcctcaacggccgcaccgacaacgccgtcaagaaccactggaactccaccctcaagcggaagtgctcctccacgtgctcggccggcggcgacgacgccgacgccctcgcggagcagcagccgctcaagcggtcggccagcctcgggacgcccacgggcggcaacaacgccgtctccgatctgttcttcagcccg

SEQ ID NO: 2031 - DNA, 412 bp, Eucalyptus grandis
gctctctctctctctctctctctctctctctctctctgtggtggctttcttctgtttttggctgtgatcagacaaacaaaaaccatctggttcggcgtctgaacaagaaaaaatttgagaagggattcaaggaagatggcgaaagagaagataaagataaagaagatagacaacttgacggcgaggcaggtgacattctcgaagaggagaagagggctgatcaagaaggccgaggagctctccgttctgtgtgatgctgacgtgtccctcatcgtcttctcagccactggcaagctctatgatttctccagctccaggcagatgaagggagaggatctggaggggttaaacgtggaggaattggaccaattagagaagaaactcgaggcgggactgagcctcgtgatcaaga

SEQ ID NO: 2032 - DNA, 495 bp, Eucalyptus grandis
gagttaccaccacccctttgttttattttcgatcctgcatctctcaaaatgaggaaacctgatgcctctgggaagaacagctccaacagcaacgctaacaagctgagaaaaggactctggtcgcctgaagaggacgacaagttgatgaactacatgctcaacaatggccaaggctgctggagcgatgtggcccggaacgccgggctgcagcggtgtggcaagagttgccgcctccggtggatcaactacttgcggcccgacctcaagaggggcgctttctccccacaagaggaggagctgatcatccacttgcattccatccttggcaacaggtggtcgcaaatcgcggctcggttgccgggacggactgacaacgaaataaagaacttttggaactcgaccataaagaagaggtcaagaactcgtcatcatcttcttgtagacactcggcaaacacgagcgattctccttgtcatcagacgttaaagatgtatg

SEQ ID NO: 2033 - DNA, 220 bp, Eucalyptus grandis
gcccccgagatcgcgccgccgctcgcggcccctcgcggcgggcaccaccggcgggcgcactccgaggtcaatttccggatcccggaggacctggatctggggccggatccgttcgagaacgggccctccgggagcttcgaggacttcggatcggaggatgatctactcagcacctacatggacatcgagaaattcggatcaagctcgacgcgggcagggg

SEQ ID NO: 2034 - DNA, 445 bp, Eucalyptus grandis
cttctgagaatgtgtccggtggagccatcgaacgtcccagagccacgggaaaattggctgcgcctgtaaactcgcccagcatgtcctcatcattggacctgaagaattcttgcatggatgcaaatgccaaccctgtgagcattttgcaacctggtgtagtgccacctgaagcctggttacaggtaatgtcactctgtggtaggttacttaaaatatttccctggaaggccagtacttctgttctttctgctgtttcttcaagttgctctctacaatatcatcgactttgtttctcaaaattcgctttgtgtaagaatgaaagagaactgaaaagggagaggaggaaacagtcgaaccgtgaatctgctagaagatcaagactgaggaagcaggctgagactgaagaacttggcaaaaaggtggattctctgagtgccgagaatag

SEQ ID NO: 2035 - DNA, 349 bp, Eucalyptus grandis
ttttttttttgtatataatctctttatttctagttagggaaaattcagaaagaagccgtgaaggaacttcatccaatggcgatggaaaatctgaagtgcaaggaaaggttgctggggaggtggatgctgcttctgagaatgtgtccggtggagccatcgaacgtcccagagccacaggaaaattggctgcgcctgtaaactcgcccagcatggcctcatcattggacctgaagaattcttgcatggatgcaaatgccaaccctgtgagcattttgcaacctggtgtagtgccacctgaagcctggttacagaatgaaagagaactgaaaagggagaggagggaacagtc

SEQ ID NO: 2036 - DNA, 648 bp, Eucalyptus grandis
gagagagagaaagccagagagagaaagaggaggattttggatgaacgtatattcattgggaggtgctagtcatggggaggcaaccgtgctgtgacaaatccggggtgaagaaaggaccgtggacggcggaggaggacaagaagctcatcaacttcatcctcaccaacggccactgctgctggcgtgccgtccctaagcttgccggcctccgccgctgcggcaagagctgccgcctccgctggaccaactacctccgccccgacctcaaacgcggcctcctcagtgaggctgaggagcagctcgtcatcgacctccatgcccgcctcggcaacaggtggtcgaagatcgcggcaaggttgcccgggagaaccgacaacgaaataaagaaccattggaacacccacatcaagaagaagctgctcaagatggggatcgatcccgtgacccacgagcccttgaacaagcctcagaaaactccatccgaacacgacccggaagcttctctgtcgtcatcgcaagcggaccctacgtccgaatcgcccgccaacacgcaccaacccaacaacgcccacgcggacgaagtacaactcgtcctcgtcctccccgtcggcctgtccgccgagaactgttgctccggcagggacgagt

SEQ ID NO: 2037 - DNA, 268 bp, Pinus radiata
ctgagcagaaatatggatgacgtatttgttcagcgctgcaacagaaactttacagctcgagatcggctaatctctaaagagagaaggaatttcgggtgggtttgtggcgttactgaagaggaagaagaacttattatcagaatgtataagctcgtgggcaacaggtggtcattgattgctgggcgccttcctggtcgaaaagctgaagagattgagagatattggaagatgagaagcataaatgctgcacctctgaagcctaatacct

SEQ ID NO: 2038 - DNA, 1055 bp, Pinus radiata
ggcgaatcgagctccagtctctgcccttaggcacacgtacaacatacgtggctaacagagataacacccaaagcctatccagccatggtcgatggatggttggacagtgatacaggcaggagagggttcagctggaccacagttttggatagaatggttgcttttgcctcctcggctcttactaatcttctgactttggcagtatgtcttccgtgatatatttaatgtgtatacgttcttttggggattgcgagacagcagatccaagtctgggctgtggatctggaacgcattttaagctctggtctcttcaattgggtttctggtagcgagctccatcacaatggtcaaagaattgttgatgatgtgttccaactgtgggcacagtgggcacagctccagagcctgtcctgatagaggatctgtcaaattgtttggggtcaggctcattgctacagacgatggcatggcctgcatgagaaagagcctcagtatgggcaatctcggtcattaccgttcactttacaatgtcaatcactgttctgggacaagcgaatgtggatctgcagatcaggatgggtatttgtctgatggatttgttcattcttccagcaatgcacgcgagaggaaaaaaggcgtcccatggtcggaggaagagcacaggatgttcttgtatggactggaaaagcttgggaagggtgactggagagggatatccaggaattttgtgacgaccagaacacccacacaagtagccagccatgcccagaagtattttctaaggcagagcaatcttaataaaaggaaacgtcgatccagtctctttgatatgtgtcctcatgattcccatgtcacaagctcttttcgcagagaagactcattgggaaacctttatgaattttcgccaaaacattcggctttgggggtatcgcctaatttcgaactatattcatttggtgtttctccaactttatctctaggaagatccctgcaaccagtggaagcagttcttgaagagaaagcagcccattatcatcctgtgaactcagaagaag

SEQ ID NO: 2039 - DNA, 167 bp, Pinus radiata
tggttacagctctgtagcggaatagatgaacatgcagctggattctgttctcaacttgtgtttgcaccaattgatgcatcttttgctgatgatgctcctctggctccctctggtttccgagtaattcctctagaatcgggatcagaatgtttctcctccaaaacgga

SEQ ID NO: 2040 - DNA, 357 bp, Pinus radiata; identical to SEQ ID NO: 360

SEQ ID NO: 2041 - DNA, 438 bp, Pinus radiata
ccgaagcaagatcagaaactcgttacttacatacaggagcatggccatggcagctggagggctctgccgcagaaagctgggttgctgagatgcgggaaaagctgcagattgcgttgggctaactatctaaggccagatatcaagcgggggaagttcactgtgcaggaagagcagactattattcaacttcatgcactacttggaaacaggtggtccgccattgctactcaccttcccaagcgaaccgacaacgaaatcaaaaactactggaatacccacctgaagaagcgcttgctgcagatgggaatcgaccccgtgacgcacaagcccaagtccgaatcgattatggtacctggtgttcagtcgtccaatgggtcctcgaatctgagccatatggcgcagtgggagagcgcgcgcctggaagccgaatcgaaggct

SEQ ID NO: 2042 - DNA, 319 bp, Pinus radiata
ggaattttcattggaggaagttgtgttggtggggatcaaagtcattcaatgagtggaaatggagccctagcatttgatatggagtatgctcgttggttggatgagcatcatcgacagataaatgaactgaggtcagcagtgaactcacatgtgggggacaatgagctgcgtggtctggttgaaggtgtcatgggacattacgatgaaatttttcgtctgaagactgtagcttcaaaagctgatgtctttcatctggtctctggcatgtggaagacgcctgcagaaagatgcttcatgtggatgggaggattccgtcctt

SEQ ID NO: 2043 - DNA, 404 bp, Pinus radiata
aaccggagagcaagaacaaagtggaaacgcaacgaagtggagtgcgataatctgaaacggtgttgcgagagtctgagggaggagaacagaagattggagaaagaagtgcagtcgctgagagccatgaaagtcccgcagtcacccaattcgatgcctctggcagccgccaccctcgcaatgtgtccggcctgcgagggccttgcaatcaagaaccgcggcgccgccacttcctccaccgcgaagtcacaacaatccctccttacaattatggggattggggatgtaaatatgatatccaaaaataaccaaaccccttcaatgggaatgggagatgaaatgaattgaagaaagtgaacttaaaaaaaaaaaaaaaaaaactcgagactagttctctctctctcttc

SEQ ID NO: 2044 - DNA, 379 bp, Pinus radiata
ctggaacctgatagaagagaagattgaaggaagatcaggaaagagctgcaggcttcggtggtttaatcagttggacccaagaatcaaccgaaggcctttcactgaagaagatgaggagaagctactggcagcccatcgtttatatgggaataaatgggccatgattgctcgcttatttcctgggagaactgataacgctgtgaagaaccactggcatgttatcatggccaggagatacagagagcaatccagtgcttttgggagaaggaaattgcctcaagttcatagaagagagaaacgtgcctgcactgatgatgaaacgaggatgggcagcagcagctgcaacatgtgggtggataaatatagctctctcaaatct

SEQ ID NO: 2045 - DNA, 369 bp, Pinus radiata
ctcattgcttacattcgagccaacggcgaaggcagctggcgttcccttcccaaggctgcagggctgccgagatgcggaaagagctgtaggctaagatggataaactacctgcgtcccgatctcaagcgtggaagcttcacagaagaagaagacgaactcatcatcaaactccactccgtcgtcggcaacaagtggtctcttattgcaggaagattgccggggcggacggacaacgagataaagaactactggaacactcacatcaagagaaaattgctgatcaagggaatcgacccccagtcccatcgtcctctcgggcagccctacagcagcaacaatatgcccgtctctcggctatttctgacctcg

SEQ ID NO: 2046 - DNA, 530 bp, Pinus radiata; identical to SEQ ID NO: 335

SEQ ID NO: 2047 - DNA, 358 bp, Pinus radiata
gctctaccagtgtcaagccttgtttgaaaatggcgcagtcgaaaaactctcaagaacctataatgatctatatgatgatttaaaagaagaaatactgtcgtggctgccagtggaatgtgtgtgcagatttcgcagcgtctcaaagcagtggaataatctcctgtcatcacacaatttcataaaaaaggtatggagaaagaagcctgctaacatgaacccatggctcgttctgcatcctgtcaactcctcctattgtttggcatactgcttcttcacaagaacctggaagactacctcctctatctccattgaaaatgccaataattatggagaaaacggaatcttggggatcagctgc

SEQ ID NO: 2048 - DNA, 376 bp, Pinus radiata
aagacaagaagctcattaatttcctgactactcatggccaatgctgctggcgcaccgttccagagcttgccgggatttcaagatgcggaaagagttgcaggctgagatggacgaattatcttcgccccgatttgaaacgaggagtcttctcagagtccgaggagaaacttattttagatcttcattcgcgtgttggtaacagatggtcgaagattgcctcgtttctgcctgggcgaaccgataacgagctaaagaactactggaacacccacatcaagaagaagctgaagcgcatgggactcgaccccggcgacgcacaggctatttcagaaacactaccacagccagcccctgtagctgagaataatgatgtccc

SEQ ID NO: 2049 - DNA, 656 bp, Pinus radiata
caaacaatcatcacgagatgaaattcccttcagaatgggatttctgagattcgatccttgatctgttgctgcgatctgatcacattttattgggggtttagggtttaagttttctctgctaatggcatcgatgaaaggaaaatctccgggtcacgatgagcccgatcggatcaaggggccttggagccccgaggaggacgcagcgctgcagcatttcgttcagaaatacgggccacgcaactggtcactgatcagcaaagcgattcccggccgatctggcaagtcctgcaggcttcgatggtgcaaccagctgagcccccaagtcgagcaccgccccttcactcctgaagaggacgccactatcgtgagagcccacgcccagcacggcaacaaatgggccacgattgcgcgcatgctcagcggcagaaccgacaacgctatcaagaaccactggaactccactctcaggaggcgttgccaaggtgggggcgccctcgtcatcgacgacgagatctccagcggcgccgacgggtttcgaaaacggaacctcagcgaagacgccgatgccagccggaaattcaagaagctcagcctcgggacgacgacaacgaccacgaccacggagcctagcacctcctcggcctcggatcggagcg

SEQ ID NO: 2050 - DNA, 466 bp, Pinus radiata
atggggaagacgaagatggagatgaaacacattcaaaaccctagccgccgccaagttactttctcgaaacgcaagaacggattgctaaaaaaggcattcgagctttctgttctctgcgatgctgaagtcgcccttatcattttctcggaaactggcaagatcagcgagtttgcaagccacaacgacatggcaacaatactggaaaaatatcgcatatacacgcaaacagaaacagatggaaacatgggggcttcgtcggtccaaagcgtgaagggatggtttcctaattttctcgagattgcgggattcagtgtttgtggatgatccctattattgcagtgtgggttggggcacgaggggtgcagttgactcgactcatatgattggaaggttggtgaatcacaattgaaagcgttgcacgagaggatggacaatttgaaaaaacaggaacgaaacatggttggtg

SEQ ID NO: 2051 - DNA, 390 bp, Pinus radiata
gtttgaagtagaatttacctatcaattgcgttaaagatactctgttttcggccctgaaccctaccaggggaacgcggcgccatgtcttcgaggagctgttcgttgtgcggccttaatggccacaattcccgtacctgtgtgggaagtggtgtgatgctctttggggttcgtctgacggatggaccaatgagaaagagtgctagtatgaataatttgtcaaacttatctcaatatgagcactcggatccggctgaggttgccgctgaaggttttgatggttacgtctcggatgacctcgttcattcatccagcaatgcccgtgagaggaagaggggagtgccctggacagaggaagaacaccggatgtttcttgtcggccttcagagagtc

SEQ ID NO: 2052 - DNA, 312 bp, Pinus radiata
gtttgaaggggaacgcggcgccatgtcttcgaggagctgttcgttgtgcggccttaatggccacaattcccgtacctgtgtgggaagtggtgtgatgctctttggggttcgtctgacggatggaccaatgagaaagagtgctagtatgaataatttgtcaaacttatctcaatatgagcactcggatccggctgaggttgccgctgaaggttttgatggttacgtctcggatgacctcgttcattcatccagcaatgcccgtgagaggaagaggggagtgccctggacagaggaagaacaccggatgtttct

SEQ ID NO: 2053 - DNA, 393 bp, Pinus radiata
cgaggtcgagtccagctgaggaggatcgaaaacaaaatcagtcgtcaagtaactttttctaagagacggaacggactgatgaaaaaggcggcggagctgtcaatactgtgcgacgctgaagtggccttaatcgtcttctccaacaaagacaaactgtacgagttcgccagttccagtatgaccaagattttggaaagatatcggaagcgttcaaatttaatacaagatatcggtaaagatccacagaattcagacattgagttgacgcgtctaaaagaagaggttgaccgcttacaaagatccagaaggcatcttttgggtgaagaccttcatcaactaggtgctacggatctgcaacacttagaacaacagcttgaagaagcgttacaaaag

SEQ ID NO: 2054 - DNA, 210 bp, Pinus radiata
cacagttctggaacctgttaaagagaaatcagtcgaggtcaaactccttctgtttgcacgaggatgcccagcattatggagaagcaaaatagtggtgaagatagtgatagcaagggtcagcttgataatggcaagtatgtccgttacaccaatgagcaggtggagactttagaacgtgcttataatgaatgctcaaagcccagcacaagg

SEQ ID NO: 2055 - DNA, 385 bp, Pinus radiata; identical to SEQ ID NO: 389

SEQ ID NO: 2056 - DNA, 545 bp, Pinus radiata
tgaagaccttgatgattgtatccatccaccggagaagaagagaaggctgactgctgaccaagtgcagttcctggaacgaagctttgagatcgaaaacaagttggaacctgagcgcaagatacagctagccaaggagttgggcctccaacctaggcaagttgcagtctggtttcaaaaccggcgggcaaggtggaaaacaaagcagttggaaagggattatgatattctgaaatcacgctatgagaatttgagagttgattatgatagcctgctcaaagaaaaggataaattaagggctgaggttaccttcctaacagacaagctacacgacagtgaccatgaagccctcacaaaggattctgagtctgctgacaagaaagtctatccccagcctgcctcccactctgactgtgttggggagcctgaaagaagtactgctgccaaggatacaccaccaggttgtaaacacgaagatcttctgagctctggaacagatagcagtggggtcctggatgaagatagtcctcaccatgttgactgtggtc

SEQ ID NO: 2057 - DNA, 385 bp, Pinus radiata
aaacttgctcacggattccgacccttccggctaaagctgctgcatttctgtgtgtattgaagatggggagatctccctgctgtgaaaaagctcatacaaacaaaggggcgtggaccaaagaagaggacgatcgcctcatcgcccacattcgaactcacggcgaaggttgctggcgctcgcttcccaaggccgcagggctgatgcgctgcgggaagagctgcaggctccgatggataaactacctgcgtcctgatctgaagcgtggaaacttctcagaagaagaagacgaactcgtcatcaaactccactccctactcggcaacaagtggtctcttattgcaggcagattgcccgggcggacggacaacgagataaagaactactg

SEQ ID NO: 2058 - DNA, 436 bp, Pinus radiata
aaagaagggtgttccctggactgaagaagagcacaggcagtttttgatgggccttcgcaagtacggcaaaggcgactggagaagtatttctagaaactttgttgtgtcaaggacaccaacccaagttgccagccatgctcaaaagtactacattcggcttggttcggataataaaaacaagagaagatccagcatacatgatatcaccactgttcatggtacagacaggatgccttctcctttactgcacgtttctaataggcagactaattccccctcaacacaggcagaaatgaatcattcaccatgtctggacatatccatctcagatttcacgaggacctctaataaactctttgggacctcaaatagatggtaaccttctattttcacctcactatcctctaaatctgtatacccagagagggtttggggg

SEQ ID NO: 2059 - DNA, 624 bp, Pinus radiata
tttttattcaaatgacagcacgacttcccttcctcagatgtttcccaggctgcactcatcagctgcagcaccacgcggttttggattctccctgttctttgttctgttgcgttaaagattggttgcaggtcgaatcgcccaggccgatttgaattctcctgaggattgacaagatgacgcgcaagtgctcgcactgtggcaacaacgggcataactccaggacgtgccctaaccgcggcggggtgaagctcttcggcgttcggcttaccgatggcccgatcagaaagagcgctagtatggggaatttgatgatgatgtccaaccctagctctcccgctgacccctccgagccggcctctgccgctgctgctgccgcggcggcggcggccagtggctatctctctgatggtcttgttgaagcctccacttcctccaattctcgcgagcggaagaaaggtgtgccatggacagaggaggaacatagaatgtttttgctaggtttgcagaagcttggcaaaggtgattggagaggaatagcacggaattttgtcataacacgaacacctacacaggtagccagccatgcacagaaatattttattcgacagagcaatatgactagaa

SEQ ID NO: 2060 - DNA, 364 bp, Pinus radiata
atcgaggaaaaccagaatcttctcattttcacttgctgtgggtttctctggactaacgatgaagatgtctctaccttctaatgttctcactctcagtgcggattccaattctaattccaattcgatctcctcgtcaggagacgaactcgccgcaaaggtgaggaagccatacacaatcacaaagcagagagagaggtggagtgaagatgagcatcttaagtttctggaagccctgaaaatgtatggccgagcatggaggcgaatcgaagagcacataggcacgaaaacagctgtccagatacgaagccatgctcagaagttcttctccaagttggtaaggggatcttcaaataaaggtgtgtct

SEQ ID NO: 2061 - DNA, 258 bp, Pinus radiata
gagggatagacatgaatcggggtccggctaccaatgagtctgagtattcgtcggttttccaggccgatgccttgcggacgattgacactggttccgtggtagtgaagcgagagcgagaaagaacctttgagttggaggcggagagggatcgaacctgcgacgtgagttccaggacaagcgacgaggaggagataggttcgacgaggaaaaagcttcggctttccaaggagcagtctgcactcctggaggaaagtttct

SEQ ID NO: 2062 - DNA, 347 bp, Pinus radiata
aacttggagtcactcacgttgaaagaattgcaacaactggaaaagcaattaggcagggctataaaaaagatttataataaaaagatgaaaataatttcacaatgttgcaaatcattatcagaaaaggtacgctctttggaagaggagaatagtgaacttcttaccaagttgattcctagagccgattcctccacttctggggctgcgttatttgttgatacatccatgccaaaatctcactcagcaaccgaagcatggcgacaactcctccagcgagtccttgtgacagcagcgaagatggcgacaactcctccagcgaggcacagtaattcccgaccgaaccacta

SEQ ID NO: 2063 - DNA, 267 bp, Pinus radiata
tggcaaggcaacatcgggatctgcaaatgaggccatgtcacaaagtggggacagtggcagtgacggttcaagcgaaggaagcgaggaatataacactcaaactgagtcacaagtggcgagaaagagaagttttgatcaaatgatagtagatggagccaatgctcagagtaccaatattcaatcatataattcccaggctggagaaccctatgtgacttccggcgggcatgcaatgggtaatcccattagtcaagctgttgctgcagt

SEQ ID NO: 2064 - DNA, 336 bp, Pinus radiata
tcaacttaaatggaaggaacggatcttaaccgaagagaacctttttcttcgtaaaaagtgtggtgatgaacatgtggattgttcggcttttagaacacctccagcacaacttagaagcatccagaacattgatgtggagactcaactggttataagacctccaactgtacaacagcaccctgacgtcgatagtcctcgataactgttgcatatgcaaattttctactttcatgaaataaacaaacagtacacctcattttgttcgccttttgtaaacgtataattactactgcatatgtaagctttcctctcaaaaaaaaaaaaaaaaaaaaaaac

SEQ ID NO: 2065 - DNA, 573 bp, Pinus radiata
cgcagatcgggactgcaaacagaaccatagttctgcaacattcaatgggacggactccttgttgtctgaaagtgggactcaatcgaggtccctggacacccgaggaggatctttgcctctcaaattacatcgaagctcacggagaaggcgggtggagaacacttccaaagaaagcaggtctgctccgatgcgggaagagttgcagattgcgttggatgaattatctccgacccgatgtgaaacacgggcacatattacccgaggaggaagatttaatactcaggttgcatcgtcttcttggaaacaggtggtctttgatcgctggacgtatgcccggcagaacggataatgaggtcaagaactattggaatacccacctcagcaaaaagcttatcagtcagggtatcgacccgcggacgcacaaaccgttgtcagaatccgaagacatatgttcgagtcccgggaatagcgaagtgagccgcaagtctcaacgggaaaataacgctgaaataccaagaaaagttgccgatggcgcagttgatattcaagataaggaagaggatatcacagaag

SEQ ID NO: 2066 - DNA, 407 bp, Pinus radiata; identical to SEQ ID NO: 333

SEQ ID NO: 2067 - DNA, 407 bp, Pinus radiata
atgctttgtggccggttcaaatatttgagctggcttagcttctctggttcagaaatggcggactaaagtaatagtgtgccccgaggtctggtgttcgaatctcgttggcgtgaaaggtcaaatttttctctcgagtttcattgattctgaaaaactggcatagctatggcgatgagcaatgggagattgtgtgaagatttggataggattaaggggccgtggagccccgaggaggacgcgtcgctgcagaggcttgttcagaaatacgggccgaggaactggaccctgataagtaaaggaatcccggggcgatccgggaaatcgtgcaggctacggtggtgcaatcagctgagccctcaggtggagcacagaccttttaccccgtccgaggatgctgctattctgca

SEQ ID NO: 2068 - DNA, 353 bp, Pinus radiata
attttttctgtagatggtgtgaggacgtgctgaatagttcctaaatcgtttcttccgcgtttggtcatcgaacgagttcctataactcgccaagaccaggttcttcacggactactaattttgggcttctacacatctttcccggaagtagatggggcgggcactaggaagaacagaaataaagaggatagaaaatgaagtgagcaggaatgtgagttttagaaagagacgacgtggattgctgaagaaggctgcggagttgtcaatactttgcgatgcaacagtgggcgttgttgttttctctccggccgggaaactttctgaatatgccagcacttcggagcaaatggata

SEQ ID NO: 2069 - DNA, 393 bp, Pinus radiata
attcgaaaccctaccaatcggcactcatccttctacaaacgcaagggcggtttgcttaaaaaagcatttgaacttgctgttctctgtgatgctgaagttgctctgataatcttctctgaaaccggcaggatttacgagtttgcaagccacgatgatgtgaccacagtattggcaaaataccgaatacaaacgaaaactgccggaaacgcaatgccttcatcgcttcaaaaaacagagtttgatcaattacaagtcaggatgttgcaggagaagatagacaatttggagaaaacgaaaaagcatatggtcggtgacaatttggagtcactgacgtggaaggaattgcaacaagtcgaaaagaaattaagcaaggctacaaaaataattgtggcc

SEQ ID NO: 2070 - DNA, 461 bp, Pinus radiata
cagcctgtggctcctgaaagcatcgtccctcctcatcagccgccgcacaaccaaacgccgaaccaatacatgcaaggatggtgggtttgatatttaacatttatcattatcagttacttcaatcacaacaaaagcccaaagcgtggtaaattacgaaattagaattatattatcattaaaaaaaaaccctattttcattgtatagcagtaggcttgatttactgctatgatagcggaggttttattgggcaaacaaaccctactggtatattagaccttcttgtcgacaaagtttaattgcataaatcttgtatgctaatctggccgctaaaagagcgatggaaaaatagttgtcccattcacaacacatgatatgtttaaatccaacgtgtatgtgtctgcaaaatattattatacactacggtttatcacatggtagtcgattcgccataaaaaaaaaa

SEQ ID NO: 2071 - DNA, 373 bp, Pinus radiata; identical to SEQ ID NO: 1982

SEQ ID NO: 2072 - DNA, 506 bp, Pinus radiata
ggactgcagaggaagacagaaaactggtgaattttatcaccctgcatggccatggatgctggcgcgaagtacccaaacttgctggtctgcttagatgtggcaagagttgtagattgcgttggacaaattacttgcgcccagatttgaagcgtggattattgtctgaatcagaggagaagctcatcattgatctacatgctgccatagggaataggtggtcacgaatcgctgcgcaattgccagggagaactgataacgagatcaagaattactggaacacgaggatcaagaagaaactgcgccagatgggaatcgatcctgtgactcacaagcctctcacccaaatgcaaatgcagagcacccctgcccagactctgctgctgcaagaaaatgatacagagcagcagcagcaggagcaacataatgagcctgatcctgatcagaatcagagcagcaatggcactgtggagacattggtctcgagggccagagaaccccacgaccac

SEQ ID NO: 2073 - DNA, 494 bp, Pinus radiata
attcagatggaacaacaacaatgtctacatatgaaagaaaagccagtcttcgagaattctatgctgttatatatccttccttgctgcaacttgaaggaggtataacagagatggaagataataagcagaaactgatttgcaaagaaagatacaagaaacgtgttgatgaagaaaggagacatctttctgagcttgatctggaacgtgaaaaagagtgtggaatatgtatggagactcagaccaaagttgtattgcctaactgcagtcatgcaatgtgtttgaattgctatcgggaatggcatgcacgatcagaatcatgccctttctgcagggatagcttgaaaagagtgaactcaacagacttgtggatttttacaagtaatgaagaagttgttgacatggaaacattgggcagagagaacttaaaaaggctatttaattacattgataaattgccacttatagtgccagagagcctgttttatgtttatgat

SEQ ID NO: 2074 - DNA, 1678 bp, Eucalyptus grandis
ctttttcttccctgtcctgtttctctgtgctcacatcttttaatatcacaccgaggctggaattctgccaggagccgcctctggtgctggctgacatttcacctagaagtcacaaaaactttgtagttaccattttcggaaagattttgaggaaacacgcgcagagggagagagagagagtggaagagagagaatctagtctctggatggggaggcattcttgctgttacaagcagaagctcagaaaaggcttatggtcacctgaagaggatgagaagcttctgaggcatatctctcagtatggccatggttgttggagctctgtcccaaagcaagccggtctacagagatgcggcaagagctgcagattgaggtggattaattacttgaggcccgatttgaaaagaggggcgttctcgcaagatgaagaggacctcattattgagctccacgctgctcttgggaacaagtggtcgcagattgcagcaaacttgcctggcagaactgacaatgagataaagaacctgtggaattcttgcctgaagaaaaagctcaggcagagaggcattgaccctgtgagccacaggcctctctctgaggttgagaatagtgacgacaaggacgcaacgtcagggcagacccaagataaggtctctcgtgggtcagttgaattgctgagccagctcaatccacaattctcaagctccacgacagcaaggagcagtaaaaacagcaatttgatggcaccaacattgagcaaggacacagttgcagatgggtttgtgagcaatcaccaagagaactcgatgatgaacagttgcatctcagactttgttgataatttctctctgcaacaattgaactactcatcaagtgattccagattttctaatctctgtttcacccaaacgggcagagcacatggaaacaccatcttttccgacttcaattcgaatgtaatatctgccatttctcctccctcatctaactctttattccctactgcttcaatgggcttcaacttcaagccatctaatgctgtcccctcggcgaattcgacttcaagcgctagcacaggaactgcagattttcacaacagtggctcctacttcgggaacagcttagtttcctggggattgttagcagattgtggctcgccagacaaggaggggtcgacttcgatccatccattggaagttcaccaacccggagacttcaagtgggctgccgaatatctccagaaccctctgttcatggcggccgcgctgcagaaccaagcccaggaacagtccaatttgtacaatcagataaagccagagacccagtttcctccagaccattcaactacttccatgtgggatcatctacagggacatgaatccttggacaattctttgaatacgtgcggcaaggatatccagagattaacggcgctactcggacacaattagatagaggattatattagctgatggagcctcagctgttgaagcaggaggggatcatttgattggtggcgacttgagaatttgcagattgttatttgttacaggtgtggactataattttttttttttaccccttttcctctttcaatgtacatagttctgatacaaaacatctgcatccccttgccttttacctatatttgctttaagaaaaaaaaaaaaaaaaaaaa

SEQ ID NO: 2075 - DNA, 636 bp, Eucalyptus grandis
aaacagagagagagagagatcatgagatacccagctccagctccagcttcaaggggcaagagcacgagcacggcaacgccatgctgcagcaaggtggggataaagagaggcccgtggacgccggaggaagacgaggtcctcgccagctacgtgaggagggaaggcgaggggcggtggcggaccctcccgaagcgtgctggcctccagcgctgcggcaagagctgccgcctccgctggatgaactacctccgcccctccgtcaagagaggccagatcgctcccgatgaggaggacctcatcctccgcctccaccgcctccttggaaacaggtggtctttgatagctggaagaatcccgggccgcaccgacaacgagatcaagaactactggaacacccacctcagcaaaaagctcatcagccaaggaattgatccccggactcacaagccattattgaaccataaccctagttcttcactagcagcccatttgcaagatacttataatgcttcaacattcacaccgaaagcaacttaccctaatcctacagtaccagtggaagaaaccggcgacgaaaatgatctgaaagtgggcagacagccagctgggtcagcctcaaaacgcgggcgttgccaa

SEQ ID NO: 2076 - DNA, 862 bp, Eucalyptus grandis
caaacgtctccgtttctctccaagctgaacatggacaagaagccagacgacgacagtggtaagtcccaagatgtcgaggtgagaaaagggccgtggacgatggaagaggatctcatcctcatcaactacatagcgaatcacggcgaaggcagttggaactccctagccaaagctgctggtctaaaacgtaccgggaagagttgtcggctccggtggctgaactatctgcgacccgacgtccggagaggcaacatcactactgaggagcagctcctgatcatggaactgcatgccaagtggggaaacaggtggtctaaaattgcaaagcatcttcccggaaggactgacaatgagataaagaacttctggaggactagaatccaaaagcacatcaagcaagcagaggctttctctggtcagagctccgagatgagtgatcaagcaagcacaagccacatgtccagcatgccagagccgatggagacctacgactcaccgccgtcattccaaggcaacaacaacatggagcctttgccggtgaatttgtcggtcgagtcaaatgaagcctactggagcatggacgatctttggtctatgcagttactcaatggggattgatcgcggggtgacgtatggtgcagtaatcgaaatggttcgtttacaataatagctaggtttgtttacataaaatggacattagcttttatctcacatatatatctacatacatgtgctagtttagaagttatctacaaatatgtgcatgagttgtaaacgaaactaccatctgcagtttgcatccccgctatgtaatgactgaaataatgaagcgagattatttggcttaaaaaaaaaaaaaaaa

SEQ ID NO: 2077 - DNA, 907 bp, Eucalyptus grandis
gagatggacaagaaaccgtgctaccgcacgcaggatcctcaagtgagaaaaggaccatggactcttgaagaggatctgattctgatggactacatagccaaccatggcgaaggtgtatggaactctctagctaaagctgctggtcttcaacgcaccggaaagagctgccggctgcgatggttgaattacctccgacccgatgtccggagaggtaatatcactcccgaagaacagctcttgatcatacacctgcaatccatgtggggaaacaggtggtccgaaatcgcgaagcatttgccggggaggaccgacaatgaaataaagaactactggaggaccaagatccaaaagcacataatcaagcaatcggaaactgagatcaacgatctcactattcctccatcatccgcaaacgcatgcacagatcatcgcggggtctcggccgcaaatacaatcgagatcgcctgttctccaccgtcggatcaaggcggctccggcgagactatgctctcggcccttcctcctgcccaagaaccgaacgacagcgcttgctggagcgtggaggatctctggcccatacagtcactaattagcggcatgggtgatgatgcccaatactattccgtttaggccttaattagattatagatcatgacctgatgaacaaaacaaaagcaattagaagacccaaagggctcatttattgggtctttatgttgaagctagctaggtagatcttgtatgtatagagaaaaggccacagcatatcatatttcctatgtgatgtgctgtatacactaccatagctttgtgctaggtatattagctagcttgtagcagtggcaacatatctatcgaaataagaacttagataatacagcttttggttaaaaaaaaaaaaaaaaaa

SEQ ID NO: 2078 - DNA, 658 bp, Eucalyptus grandis
gggagacgtctccagctcgagtcgtcatctgggtccgcgtcttctcttcccttcttccaatggtttgatcctaggacagagagagaaagagagagatataccgaaagagaggtacagagagatagagggagagggagagggagactcgtggcgctgtttcgagctttctagcttccggaggaggagggctggtgttgagcgaaacttggagaggtcatgaattcgacaaccactcagtttgtgtcctctagaaggatggggatgtatgacccgattcaccaaattggaatgtgggacgagaacttcaagcagaatggaaatcctaatgcgccgccagctctgatcatacctatgcacgcgaatttggacaaccagtcggaggatacttctcatggatcacaggatactgctggcaagtatgagcaagaaacatcgaaaccttatgataaggtgcaaagacgtcttgcccaaaaccgtgaggctgcgcgcaaaagccgtctgcggaaaaaggcttatgttcagcagctagaagcaagtcgtttgaagcttatgcagttagaacaagaggttgaccgagctaggcaacagggtgtgtacatggcttcaggagtagattcagcttatccaggatatggtggatgtttaaattcaggaatcg

SEQ ID NO: 2079 - DNA, 373 bp, Eucalyptus grandis
gctcacttgggtcgcctctcgttctctcgtttctcgcctccttcttcgaagcagcagccagcacagtcgcgcaacgtgaagaagataaaaagaagagtgtggtcctgacgggaggggggcgtctctctagaaagactacgttttttcctttcgttaagaaatgagacaggggtctttctagcttctgggtcttgaggaggagggccattttcttcttgccgattcgataggttggcagcccgggatgatggcggtgacttcggcctgtaaggacaagatggggatcgacaacgggaagtatgtgcggtacacgcccgagcaggtcgaagctctcgagaggctgtatcacgagtgcccgaagccgagttcactg

SEQ ID NO: 2080 - DNA, 421 bp, Pinus radiata
gttccagaccttttgcatcttcattattcttccgcctgtgaaaagatggggagatctccgtgctgtgagaaggctcatactaacaaaggggcctggactaaacaagaagacgaccgccttatcgctcacattcgagcccacggcgaagggggctggcgttcgcttcccaaggccgcaggttgcttgcctgcgctctgctttcttaactgaattaatggctgcctgtaaattttccgtttaaatataatgtttcttgatgtccgatataacgtttcttgattttccgatataatgtttcttgattttccgatataatgattttcgattttccgtttatatataatgtttcttgattttccgattgcagggctgctgagatgcggcaagagctgcagactgcgatggataaactacctgcgtc

SEQ ID NO: 2081 - DNA, 746 bp, Pinus radiata
gtttaattcgacgacacctttgcctgttagaaaggcgcgggaggcttatcggaagccacaccaaaccaaatcagaaataatgggtagggctccctgctgcgaaaaggttgggctcaaaaagggcccctggacgcccgaagaagatcagaaactcgttacttacatacaggagcatggccatggcagctggagggctctgccgcagaaagctggtgattatgaatttatatttagttctagaacttgcaagaaattctctgtatttttgttttttgggtagttttcatgggttgagttttatgcagggttgctgagatgcgggaaaagctgcagattgcgttgggctaactatctaaggccagatatcaagcgggggaagttcactgtgcaggaagagcagactattattcaacttcatgcactacttggaaacaggtggtccgccattgctactcaccttcccaagcgaaccgacaacgaaatcaaaaactactggaatacccacctgaagaagcgcttgctgcagatgggaatcgaccccgtgacgcacaagcccaagtccgaatcgattatggtacctggtgttcagtcgtccaatgggtcctcgaatctgagccatatggcgcagtgggagagcgcgcgcctggaagccgaatcgaggctggcgcgcgagtccaagctcagggcaaggggcctctggtctgcccagttgagaaacgttaatgcgagctcggatttattcagcc

SEQ ID NO: 2082 - DNA, 244 bp, Pinus radiata
gaagatatcaagcaaatagttacacaccaagaaaatccacaatgggtagatctccttgctgcgcaaaggaagggctcaaccgcggggcctggacgaaaacggaggatattattctctccgaatacattcgaattcatggcgatggtgggtggagaagtctccccaaaaaagcagggcttaagcggtgtggaaagagttgtagattacgttggttaaactatcttcgtcccgacattaaacgcgg

SEQ ID NO: 2083 - DNA, 1151 bp, Pinus radiata
cttcaacaggtttttgttctgaaatcctgttatcacttcgctccatcttccatttttgttttctgacaaccttttaaacatgggaagggcgccttgctgctctaacgatgacagaaacaaaggagcctggaccaaagaagaggatgacaggcttatccaatatattaaggttcatggagagggttgctggcgctctctccccaaggccgcaggtctgcttcggtgtggcaaaagttgcagactgagatggataaattatcttcgccctgatctcaaacgagggtttttctccgaagacgaagatgatcttattctcaaactgcacgccctccttggaaataacaggtggtctttgatagctggccgtttgccaggacgaacagataacgagataaagaactactggaactcgcatctgaagcgaaaacttatcagcatgggaatagaccccctaacccatcgtccttttcaaaagacttctcaccatcatccctctcctccacagaatgttagagaggctgaaacaacaccttccattgggattgttcaagatttctttcgttgcccgtctgaacttagcaccaaatccgagcaaatttcagatgctgcaagcggactcgcgcaggatgagcaaccccacccgaacctgaacctgaacctggagctctcaatagctcgctcctcagtccatcgagtagcagagaaggaggacgttgttaattcccagcaaggcgaaagcaatctgagtgagggaaagtgatatttatgtcattatggagactgccctccccctccaatgcaacaatgagatgatataaatgtccctttcccgctcaccaaagccctacggggcaataacgaatacatgaaaaccgtttggctcatagcaagtctagttttcaacacttactattatttaaggaacgtaaaaagtgtccagttcaattgatgtattttgtgacattttgctttgttagtcacttacacatgctacaagttttgttggtcagtcacctcacacttttggtgtgaaaaatggcttcaaggcttcctttgtatggataccagttgcattggcaatatgtaaaaatgcgacatgtaatgttttctaatggcaaagtatatattttaaaaaaaaaaaaaaaaaaaaa

SEQ ID NO: 2084 - DNA, 372 bp, Pinus radiata
tttttgttctgcaatcctgttatcacttcgctccatcttccatttttgttttctgacaaccttttaaacatgggaagggcgccttgctgctctaacggtgacagaaacaaaggagcctggaccaaagaagaggatgacaggcttatccaatatattaaggttcatggagagggttgctggcgctctctccccaatgccgcaggtctgcttcggtgtggcaaaagttgcagactgagatggataaattatctttgccctgatctcaaacgagggtttttctccgaagacgaagatgatcttattctcaaactgcacgccctccttggaaataagtggtctttgatagctggccgtttgccaggacgaacagat

SEQ ID NO: 2085 - DNA, 1285 bp, Pinus radiata
gggctgagagaaaagtattttccttgggctgaagagatcaggctaattatggggcggacaccttgttgtgaaaaaaatattgggctgaagaaggggccatggacacctgaggaggatcaaaagctgatagattacatacaaagccatggccatggtagctggcgtgcccttcctaaacgagcagggctcttgagatgtggaaaaagttgcaggctgagatggaccaactatttaagacctgatataaaacgtggacagttttcatttgaggaagagcagactataattgaactccatgctgttcttggaaacaagtggtctactatagctgggcatctgcctgggaggactgacaatgaaataaaaaattactggaacacccatttgaagaaacgccttcttcagatgggaattgatcctgtgacacacaggccaagaacagacctcttggctttttccaatatccaatcttcaatttttaatacacctggttttggtcatatggcccaatgggagagcgccagacttgaagcagaagctcggctgacgggagagtatttgagacaagccttattcatggcaggcaacggatcagccacagctgatctattgatgaggccgtgcaaatccgaatttggcaatgatcagtttaatttgacaaaaaatatgggcaacccaccatggatacagcagcctggaatggccttagactataagggtgccgtacctcagagtttggagcagtttttacagacaaatgtatgttctgcatcagacattaatgggggtggttgtttgagccatgaaggtggcttcaatattacgaagtttgcatctccatgttcaactctggatggaattcaaatcaaaacagaacctcagagtctgtgtggtcctcaagtagtgaaaaatgatagtcagtttcttcatagtgaaggagatctacgaaaacaagccatgcttgatatgaatgtaggatgtaatgttctcattaacatgaatgctgaatccaaggtttcatttggtcacaatggtattataactgaccaagaatacaataatttgggtcaaatagataataataaccatctttctcatgcagctactacactatggcctgttgaaggccagttgcaggccatagccagtgcctccatgcctggattgatatcttccaccagctgcacttcaaacaacatttacagccagcctggtttaattcctcttctcaattccacaacctcttcaatgggtgatacaaattcttacagagaagcgcagccag

SEQ ID NO: 2086 - DNA, 1218 bp, Pinus radiata
cgcagatcgggactgcaaacagaaccatagttctgcaacattcaatgggacggactccttgttgtctgaaagtgggactcaatcgaggtccctggacacccgaggaggatctttgcctctcaaattacatcgaagctcacggagaaggcgggtggagaacacttccaaagaaagcaggtctgctccgatgcgggaagagttgcagattgcgttggatgaattatctccgacccgatgtgaaacacgggcacatattacccgaggaggaagatttaatactcaggttgcatcgtcttcttggaaacaggtggtctttgatcgctggacgtatgcccggcagaacggataatgaggtcaagaactattggaatacccacctcagcaaaaagcttatcagtcagggtatcgacccgcggacgcacaaaccgttgtcagaatccgaagacatatgttcgagtcccgggaatagcgaagtgagccgcaagtctcaacgggaaaataacgctgaaataccaagaaaagttgccgatggcgcagttgatattcaagataaggaagaggatatcacagaagatcagacatctgctcaattgcctgagaatcagcttcttgaaacaagcaattctcaatgcccgtctgtcgctactgatttcgtgcctcaggctccctcgataccttccacggcttattcatttcaacagagcacaacttcaagtgttcccggaggcgtgtcggattcagttgatgttaatcataataagggaagtaagcaagttccttttcctctctcaaatactgcatgttttaatagttcggcacaaggggtagctggtgactatctcgaccaatatttgatgaagaatcttgttactaacagcaatgatctgataacatccactgtgagattaagctccgctttacaaactgcaccttttgtgggacaattcgattcaaatcatgtttttatgtcaggcaatgcatcgctcaatgaaaaacatcagatgcctcagaactcacaagctttggaaatggatccccaccattctttcatagcgcatccttctgaggagggcacctatgataaattgaaccatacaaggtgtgcagcttctgatcaggtcacatcattcaattatccatatcttatttctcataccgttacgggctcagcccttggggattttaatccggatatctttcctccttttgtggaatctt

SEQ ID NO: 2087 - DNA, 473 bp, Pinus radiata
gaccttttgcatcttcattattcttccgcctgtgaaaagatggggagatctccgtgctgtgagaaggctcatactaacaaaggggcctggactaaacaagaagacgaccgccttatcgctcacattcgagcccacggcgaagggggctggcgttcgcttcccaaggccgcagggctgctgagatgcggcaagagctgcagactgcgatggataaactacctgcgtcccgatctgaagcgtggaagcttcaccgaagaagaagacgagctcatcatcaaactccactccttcgttggcaacaagtggtctttaattgcagggagattgcccggacggacggacaacgagataaagaactactggaacacacacatcaaaagaaaattgctgagcaagggactcgacccccaaacccatcgtccactcggccagccaaacaatacccccgtcactcggcctgttctcgagcacga

SEQ ID NO: 2088 - DNA, 1150 bp, Pinus radiata
aaacttgctcacggattccgacccttccggctaaagctgctgcatttctgtgtgtattgaagatggggagatctccctgctgtgaaaaagctcatacaaacaaaggggcgtggaccaaagaagaggacgatcgcctcatcgcccacattcgaactcacggcgaaggttgctggcgctcgcttcccaaggccgcagggctgatgcgctgcgggaagagctgcaggctccgatggataaactacctgcgtcctgatctgaagcgtggaaacttctcagaagaagaagacgaactcgtcatcaaactccactccctactcggcaacaagtggtctcttattgcaggcagattgcccgggcggacggacaacgagataaagaactactggaatactcacatcaagagaaaattgctaaacaggggactcgacccccagtcccatcgccccctcggccagccgcacaacagcaacacgacctgcccctctctgcccgccctcgagcacgaaattcttgtgttccagaggccaagaacgccggagatagcagatttctttcaatacgagcgctctgaaagctcgccgatggaaccggccacttctaaagacgcggaagagcatcccgacctcaatcttgatttgtgtatcagcttgccagttcattcgccccccgccacgagcagagcttcgagcgtcgatggaaccgtggattcaaaacctaattcggtttcttgtcacatggggttgcaagtaaattatggtgtgcaatgtgagaacagatattgtgaagagagtgcttccggtgtctcgagtttttacacgctcgtcttatagaagatttgagctttatggtttgcttattaacaccactaagcattcatctgatgaataggcagagtgaaactatatgtttgctcattgtggcagcccggagtttgcagttaatagacagggacgcagctggacagcagttacccaaattattgtttaaagagtgtagatagctcacctatgaacataggaatcgctgtttcaccatggcgctctgtaatatttaaagcgattcatatggaagcttgagcgcgaagtctccagtgccgtatcatcaactaatgtaattgaactgcaattggtcacaaaaaaaaaaaaaaaaa

SEQ ID NO: 2089 - DNA, 723 bp, Pinus radiata
gtttgtcttccccttcattcgcaattgcttgcttggtgtgctgagaggggaggaggacgaggaggaggaaacagagcaacaagcagcccgacagacacacatctcaacaggtggatctttctcgcccgccattctatcaggtgtattattgtgcaacatatagctgaaatatggtttgggggatcttgtagtaggagcatacgatcaattttaggaaccaaggctcattttaactatgggtacaggagagatggggacaccagcgaaaacaactaaggcatccacaccacaggaacagcctccaacaagcactgccatgctttatcctgactgggctgcagcattccaggcttattataactctggaaccacaccaccacctcctcctgcgtactttcattcaagcgttgcatctagtccacagcctcatccatatatgtggggggggcagcctctaatgcctccatatggaactcttcctcccccatatgcggcaatgtatcatcatggcagcatgtatgctcatccatccatgcctccgggtgcacatccatttgctccttatgtgatgacatcgtcgttaagtacaactgaaggtgcacctgtaggcacaacttctggtgcagatgcagaaggaaagccatctgaaccaaaggaccaaactctattgaagaggtccaaaggaagcttaggcagtcttaatatgcttactggcaagattac

SEQ ID NO: 2090 - DNA, 768 bp, Pinus radiata
gtttgactgaaggtttagagttcgattcccacaggtaacagaggccacgaaggtttcaagttcgattcccacaggtcacagaggccacgaaggtttcaagttcgattcccacagttcacagagccaacgaaggtttcaagttcgattccactaggtccaggaggagcaaagaagatcgttgggctcaatggggtgcaaccagtcgaaagtcgagagcgaggaagaggtggtgaagtcaaaggagaggaaacaatttatgaaggagtcagtggcggcccggaatgctttcgccgccgctcattcggcgtccataacgtcgctcaagaacattggggccgcgttgaacgactacgggcagggcgagtcaaaggaatccctgagccaggggcatctccccgtcccccacatatatggcgatccactgcctcccgcgcctcccctgcctccgctactccctcctccgcgcccagatgagcaccccgctcgccccctggagcgctctgccagtgcaccggccatcgccttacagcaacaggcggaggaagacagaaaccctgaagcaaatgctggtgcttccattccagaaggagaagaagacgaagtagaggaggaggaggacgagcatctggtggaggtgtctcactcggttacttcttttaatccacctccgcgtccgcctccttcatccagcgaacccccaccgcctccgctgcctccgctgacgaatcagtgggacttctttgacgacaacagctacttcgagcggca

SEQ ID NO: 2091 - DNA, 479 bp, Pinus radiata; identical to SEQ ID NO: 350

SEQ ID NO: 2092 - DNA, 557 bp, Pinus radiata
gaaagaaggaaagaatggggcgagggcgcgtcgagctgaagcggatcgagaataagattaaccgtcaggtcacgttttcgaaacgccggaatggtctgctgaaaaaggcgtatgaactttcagtgttatgtgatgcagaggtagcactgataatattctcaagcagaggaaaactctatgagttcggaagcgccgggatgctcaagactctggagcgatatcaaaaatgttcatacgtattgcaagacgcgactgtatcggaccgggaggcgcagaattggcatcaagaggttggcaaattaaaagccagagttgaacttttacaacgatcacaaaggcacttattaggtgaagacctgggccccttgagtattaaggagctgcaacaactggaacgtcaacttgaggttgcactgacacatgttaggtcaagaaagactcaagtcatgttggaaatgatggatgaactacgcagaaaggagcgaattttacaagaagtaaacaaatctctgcgcaagaagttgcaggaggccgagggacaggcattcaatgccatg

SEQ ID NO: 2093 - DNA, 356 bp, Pinus radiata
agtattgaaattcccctgttttgatctgatagctatggatctgatggagtcttttgaggcaaaggggaagggagagaagaggagaacggtgaggggaaaaacccagttgaagaggattgagaacgggaccagcaggcaggttactttttgtaagcgcaggaacggtctgctgaagaaagcttacgagctctcggtgctttgtgatgccgaagtggcacttattgttttctctccaagagggaagcgctatgagttcgctaatcccagcatgcagaaaatgttggcacggtacgaaaatttttcagaaggaagtaaagcaacgagtacagcaaaagagcaagatgtccagggtttaa

SEQ ID NO: 2094 - DNA, 404 bp, Pinus radiata
gggcaaggggaaagacacagatgagaaagatcgagagcgcgaccagcaggcaggttacgttttctaagcgcagaaatggattgatgaagaaagcttacgagctgtcggtgctctgcgatgcccaactgggactgattgttttctcccccagagggaaggtctatgaattctccagtacctgcatgcagaaaatgttggcacgatacgaaaaatgttcagaaggaagtgacacgagtacatcaaaagagcaagatgtccagtgtttaaaacgagaaagtgcgaatatggaagaaaggattgaaattcttgaatccatgcaaagaaagatgttgggcgaggagctggcatcatgtgcattgaaggatttgaatcagttggagagccaggttgaacgaggtttgaga

SEQ ID NO: 2095 - DNA, 584 bp, Pinus radiata; identical to SEQ ID NO: 340

SEQ ID NO: 2096 - DNA, 453 bp, Pinus radiata
ctcttgtctgttctcgaaatcggccaaaatgggaaagaagagggtggagctgaaacgcattcaaaaccctagcagtcgacatgctactttctctaaacgcaagaatggattgctaaaaaaggcgttcgagctttctgtcctctgtgatgctgaagtcgctctcatcattttctctgaaactggcaagatttacgaatttgcgagcaataacgatatggcagcaattctgggaaaataccgagtacacgaagaaggcactgaaacgtccagtccaacatcgcttcaaaacgtaaagtatcatgaatcagggcttgagaaattgcaagagaagttgaccgctttgcaaaagaaggaaaagaacttgattggtgaagacttggaggtattaacaatgaaagaactgcaacggcttgaaaaacagttacaaattggcataaaaaggttagtgataga

SEQ ID NO: 2097 - DNA, 509 bp, Pinus radiata
gcaaccggagctttaagactagaatatatatgtagccctcgggctctgacgaatactgaaactagagatacccacctcttatctggtgtgtaaggcacgcaaaatgggaaagaagaaggtggaggtgaaactcattcaaaaccctaccagtcgccaaggatgtttctacaaccgcaagtgcggtttgcttaaaaaagcgtttgagctttctgttctctgtgatgctgaagttgcccttataatcttctcccaaaccggcaagatttacgagtttgcaagccatgacgacgtcaacgcaattctcgcaaaataccggatacaaacgggaacaacaacaaacgcgatgccttcctcgcttcaaaacaccgagccggagacgttgcatgaggagacaaatatgttgggaaaaaggaaaaaagtggagaagttgcatgagaagatcaatatgttggaaaaaagaggaaaaaacatggttggtgaaaatttggagtcattaacggtcaatgaat

SEQ ID NO: 2098 - DNA, 430 bp, Pinus radiata
gtttgttgcggttctccgttccgcgggtctgattgattaattaaagagcaagagtgacgaaaggagtctggagaatggcaagaggaaagacccagatgaagaagattgagaacgtgaccagcagacaggtcacgttttctaagcgaagaaatgggttgctgaagaaggctttcgagctctcggtgctgtgcgatgcagaagtgggacttattgtattctccccaagtgggaagctctatgaattttcgcgtccctgtatgggaaaattgttggagaagtatgaaaagaattcacgagaaagtggtataaataatgcggctaaagagaaagatactcagcattcaaaacgcgaaattgcaaatatggaagagaaaattaggatcctcgaatcaacagaaagaaagatgttggggcaaaatctagcatcatg

SEQ ID NO: 2099 - DNA, 513 bp, Pinus radiata; identical to SEQ ID NO: 380

SEQ ID NO: 2100 - DNA, 526 bp, Pinus radiata
ggattcttgtatttttgtgtgttgctgctgcaacagttcttaaataccaagacattgatgagagcttgagtaatatttctgcaaaaacccaagtaaaccctgaagctagtccaaactagtggaaggaacctcggctattctgtaagttcactcagattttgagaaactcttgggattttgctcaaaatggggcgtggtaaaatagagatcaagaagatcgagaacagcgtgcacaggcaggtgaccttctgcaagcgccgaggcggtctgatgaagaaagcctacgagctttcagtgctgtgcgatgcagatgtagcgctcattgttttctcgagccgaggaaagttgtacgagctgggcaccagcaacaacaacaacaacagtatgaggtcaatattggaaagatatcaaaagtgttcacagacggcaaaacatatgaacttttcgaataatacttcagacgagaaaatgaagcaagaaataaatttacttaaacaacaaattggatcagctaaacttactaaca

SEQ ID NO: 2101 - DNA, 295 bp, Pinus radiata
cctcttggaaggcaaatccttgtactgttccatcctcacgaattggaggttttggaggtggccaggtcatcctcccattagcccatactgtggaacatgaagagtttttggaggttatcaagttggagaatcatggcctgacacaggaagaagctttgctatcgagggatatgtttctgttgcagctttgtagtgggctcgatgaaaatgcagttggggcctgtgctgaacttgtctttgctccaattgatgcatccttagctgacagttctcctttgctcccttctggtttcag

SEQ ID NO: 2102 - DNA, 296 bp, Pinus radiata
ggagaatcatggcctgacacaggaagaagctttgctatcgagggatatgtttctgttgcaggtatcgtatcgacgtgtttctattgcttagcagagaaacttgaagtgtaaaattttaatttttactaattcatttgaattgatgatcttgccattttgattggacagctttgtagtgggctcgatgaaaatgcagttggggcctgtgctgaacttgtctttgctccaattgatgcatccttagctgacagttctcctttgctcccttctggtttcagagtcattcctttagactc

SEQ ID NO: 2103 - DNA, 475 bp, Pinus radiata
gaagtgtggatgttcttactgctttctcaactggaaatggaggaacaattgagcttttatacatgcagatgtatgcgccaactactttagcttctgcccgagatttctggactcttagatacacttctgtattggaagatggtagtcttgtggtttgcgagagatccttgagtggaactcagggaggtcccagcatgcccgcggtgcagcagtttgttagagcagaaatgcaacccagtggatatttgattcggccatgcgaaggtggaggttctctaattcatattgttgaccatatggatttggagccatggagtgttcctgaagtgctacgtccactgtatgaatcatccactgtacttgcccaaaaggttacaatgtcggccttacgccatttgcgtcaaatagcacaagaggcatcttctgatgtggtccttggctggggaagacaacccgctgcattacggacatttag

SEQ ID NO: 2104 - DNA, 1612 bp, Eucalyptus grandis
cccatctcccttcaaaaaacgacgccggcgacgacgacgaccccccaccaccaccaccaccatcgacgactcggcacagcacgcgaaccagtcgcggaaagttcgagaaggaattcgacgctcgggaatcggccgggagaagaggaggaagacgacgaatcggagccttatggtgtccgtgaacccgaacccggcgcaagggttttacttcttcgatcccgcgaacacgaggatccacggtgtcaacgccggctcggcggccgagggcggcggcgccgcgccgccgtacgcggaggacccgagcaagaaggtgcggaagccgtacaccatcaccaagtccagggagagctggaccgagcaggagcacgacaagttcctggaggcgcttcacctgtttgatcgtgattggaagaagattgaagcttttgttggatcaaaaacagttattcagattcgtagccatgcacaaaagtactttctaaaggttcagaagaatgggacaagtgaacatgtaccaccaccacggccaaaaaggaaagctgcccatccatacccacagaaagcacctaaagctccagttgtttcccaagtcaatgggccatttcaagtttcatctgcttttttggaacccgggcatattgtcagacctgatggatcagcattgcttgggaattcccgtacaagtgtagccttgtcttcatggagtcataactctgtacccgcaatgagtgcatcacaggggacaaaagatgtaggaatttctggcccaccagttccaagtaattgttgcaacagcagtagtaatgacagtacaccgaggtcctggccaaatgctcaagcaattgaacctttggatcaacagaaacatcttagagttatgccagatttcgcgcaagtatataggttcattggcagcgtttttgacccggatgctggtggtcatctacagagattgaagcagatggaccctataaatttggaaacggtagtgctcttgatgaaaaatctcagcgcaaatttgacaagccccgaattcgagaaatatcagcacggcttgtttgcttcatatgagggtggtcctgagaagtccaaatctggcggttccttcaagttgctccccgaaaaatctggaagcctaattctgtctgcgtaacttgtgactttaacaaactcgacctcttcgagtcgggcatcgtcggggaaaactgcactgtctttgaagatcaagattagtagtggagaataaagatgccaaggatcgccaagctgtggggatcgcaaaactggtccgtaactgaggtctgggcttgtggtttttgtaggtctgtaaatatcctgtgaaatgggaacacggcagtttgtgcgaacaatgctgagagacatcatcggaagtttaggctttgtataggttcttatcggactttgtatatggctgcgagatacagagatgtcgtgcgacctagaataaagcttaggcgtcgggtctgttgtgtttatgtatatgtgcgcgtgtaagatcgaagaagaggaagtagcgaggaacgtttgatcaggttgtggtttttggtagactatattgcattggctgctttctctcaaaaaaaaaaaaaaa

SEQ ID NO: 2105 - DNA, 1576 bp, Pinus radiata
gaccttttgcatcttcattattcttccgcctgtgaaaagatggggagatctccgtgctgtgagaaggctcatactaacaaaggggcctggactaaacaagaagacgaccgccttatcgctcacattcgagcccacggcgaagggggctggcgttcgcttcccaaggccgcagggctgctgagatgcggcaagagctgcagactgcgatggataaactacctgcgtcccgatctgaagcgtggaagcttcaccgaagaagaagacgagctcatcatcaaactccactccttcgttggcaacaagtggtctttaattgcagggagattgcccggacggacggacaacgagataaagaactactggaacacacacatcaaaagaaaattgctgagcaagggactcgacccccaaacccatcgtccactcggccagccaaacaatacccccgtcactcggcctgttctcgagcacgaaattccggcattccagaaccctgcaacgccggagatagcagacttgttacagcaccaccgattggaaagctcgcctatcaaaccggcagcttcggatgcggaagagcatcccgacctcaatctgaatttgtgtatcagtttgccgtctaattcggccccggccgtaaacagagtatcgagcgtcgatacaacagtagattcaaattctaattctggcgacgggctgtgctggcagtttctctgacggaggtcgtttcaataagagggtgtgcattatcgcagcacgaccacgcttatgaccagtgccaaaggcacaaggactcgtggtggaaagatgtttatagtgcaaagatctccgacttgcttatcgtggaattgaaataatgtgttggagggcgcagagacggtgggaaaaaggttttgtgtgttgcaggtctggagatatggtggggaagtgtatggataataggtatttctataatctgcaattctggtgcaattattcacaacagttagcatttatcaaggaaaaatatacttcgttttgtgttctcagtcgtaggagatataccagtaccagtacattatctgcttgcagggtaagttgaagttcattacattgcaatgccggtgccttatcgccctcatggccgtatttttaaagacaaatcccacgctgcttcagcctgcaacaagatatctttactctcattacactgatacataccactggtcaaaacttcccatcactgtcataggctggaacagagaaactgaagcctgttcaaaattttcaatacttttagatctggtaaagaagccaatgtgagaactgcaaatttcattggggcaaaactcaggtgtactgtcaaagcatgaaagtccagaatttgatggtgggatattcaacatacggcagaggtacccccaatgatgtagaaagtattgggctgggtgcctattaccacttgcagtggtgtaggaaaaagtgtagttctattgcaggagtgtaataaatgaggtagatatttttctccccgattgatgttcaatatagactcagcgacgttttatgtgtgttgaaaaaaaaaaaaaaaaaaaaa

SEQ ID NO: 2106 - DNA, 210 bp, Pinus radiata
ctatgctattacagaatgtgcctccagcactacttgtccgcttcttgcgggaacatcgctcagagtgggctgattgtaacattgatgcttattcttcagctaccatgaaagcaaatgcttacaatgttccaggttcactgggaggcattacagggagtcaagttatccttccactggcacatactgtggaacatgaagagttcttggaag

SEQ ID NO: 2107 - protein, 27 aa, Pinus radiata
MKHHVVHNCCSKKAVKRGFWSPEEDLK

SEQ ID NO: 2108 - protein, 126 aa, Eucalyptus grandis
GISRNFVKTRTPTQVASHAQKYFLRRTNQNRRRRRSSLFDITTDSYFGVSSSTMEEGHHQAHQVPSFPLSLPPAVSPGTGEKLLESLRLRKEGCQSKPTPSKPIRPVPILPIPPSSKMAALDLNKA

SEQ ID NO: 2109 - protein, 130 aa, Eucalyptus grandis
MPGFTRARKMSMSGEEEGDLRRGPWTREEDNLLIHSITCHGEGRWNMLAKSAGLKRTGKSCRLRWLNYLRPDIKRGNLTPQEQLMILELHHKWGNRWSKIAQYLPGRTDNEIKNYWRTRVQKQARQLNIE

SEQ ID NO: 2110 - protein, 146 aa, Eucalyptus grandis
CCDKVGLKKGPWTPEEDQKLLAYIEENGHGSWRALPSKAGLQRCGKSCRLRWTNYLRPDIKRGKFSLQEEQTIIQLHALLGNRWSAIATHLPKRTDNEIKNYWNTHLKKRLAKMGIDPVTHKPKNDALVSSDGQSKSAAKLSHLAQ

SEQ ID NO: 2111 - protein, 99 aa, Eucalyptus grandis
RTLPKNAGLRRCGKSCRLRWTNYLRPDIKRGRFTFEEEETIIQLHGVLGNKWSAIAAQLPGRTDNEIKNYWNTHIKKRLLKMGIDPVTHSPRLDLLDLS

SEQ ID NO: 2112 - protein, 59 aa, Eucalyptus grandis
MGRGRLQLKRIENKINRQVTFSKRRAGLLKKAHEISVLCDAEVALIIFSAKGKLFEYST

SEQ ID NO: 2113 - protein, 79 aa, Eucalyptus grandis
VKHDVETLSSKVKMAEETVKRVTGLNPMLHVMSDMSSVGVPPFDGSPSDTSADAAVPVRDPKHQFYQTNSSNPASSADD

SEQ ID NO: 2114 - protein, 104 aa, Eucalyptus grandis
QVAQLRVENSTLLKRLSDISQKYNVAAVDNRVLEADVETLRAEVKMAEETVKRVTGLNPMLHVMSDMSSVGVPPFDGSPSDTSADAAVPVRDDPKHQFYQTNSM

SEQ ID NO: 2115 - protein, 71 aa, Eucalyptus grandis
MGRHSCCYKQKLRKGLWSPEEDEKLLRYITQYGHGCWSSVPKLAGLQRCGKSCRLRWINYLRPDLKRGTFS

SEQ ID NO: 2116 - protein, 55 aa, Eucalyptus grandis
ELQHLEQQLSGALSSVKEKKEQWLLEQLERSRLQEQRAMLENETLRRQVDELRGF

SEQ ID NO: 2117 - protein, 62 aa, Eucalyptus grandis; identical to SEQ ID NO: 618

SEQ ID NO: 2118 - protein, 49 aa, Eucalyptus grandis
LFPPQSEGFFNPMDGNLSLQIGYNPTCLDEMNASVSSQNVAGFIPGWML

SEQ ID NO: 2119 - protein, 195 aa, Eucalyptus grandis
SGSQVSIIMISSTGKLHEYISPSTSTKKMYDQYQQALEVDLWSSHYEKMQENLRKLKEVNKKLQLEVRRRFGEGLNGMSLSELCGLEQDMDNAVSLIRERKYKTLGNQIDTARKKKKNAEEINKSLLQDWTNLIKHLREDDPHFGMVDNGRDYEAVIGYTDAAAAARLYTLRLQPDQPNLTSGGGSEITTYPLLE

SEQ ID NO: 2120 - protein, 92 aa, Eucalyptus grandis
MAFKSPGGITWLKHLLVKNFYLGEHLKCRNGLIKKAYELSVLCDIDIALIMFSPSDRVSHFSGKRRIEDVLTRFINLTDQERTLLDVQDRRT

SEQ ID NO: 2121 - protein, 41 aa, Eucalyptus grandis; identical to SEQ ID NO: 617

SEQ ID NO: 2122 - protein, 96 aa, Eucalyptus grandis; identical to SEQ ID NO: 655

SEQ ID NO: 2123 - protein, 76 aa, Eucalyptus grandis
FLFRRKQGAVEELKMVQEVRKGPWTEQEDFQLVCFVGLFGDRRWDFIAKVSGLKVAGENNRYVRFKAWGFFGRSYF

SEQ ID NO: 2124 - protein, 55 aa, Eucalyptus grandis
MGRSPCCEKAHTNKGAWTKEEDQRLIDYIRLHGEGCWRSLPKSAGLLRCGKSCRL

SEQ ID NO: 2125 - protein, 123 aa, Eucalyptus grandis; identical to SEQ ID NO: 657

SEQ ID NO: 2126 - protein, 105 aa, Eucalyptus grandis
MARFPRVDKSNSKKTVKKGAWSAEEDQKLVAYIKRYGIWNWTHMAEPAGLARTGKSCRLRWMNYLRPNIKHGNITQEEEEIIINLHRVLGNRWASIASRLSGRTD

SEQ ID NO: 2127 - protein, 115 aa, Eucalyptus grandis; identical to SEQ ID NO: 660

SEQ ID NO: 2128 - protein, 155 aa, Eucalyptus grandis
MGRKCSRCGNIGHNSRTCTTFMGAASACGLKLFGVQLDLSSSSPPSSSASSGSAHPYSLVIKKSLSMDRLSSSSASSSSPSSSLSSPRVLADEHCNKTSLGYLSDGLAARSQEKRKGVPWTEEEHRTFLMGLEKMGKGDWRGISRNYVTTRTPTQ

SEQ ID NO: 2129 - protein, 145 aa, Eucalyptus grandis
RGWRQIEEHVGTKTAVQIRSHAQKFFSKVARGVSGSSEGVIKPIEIPPPRPKRKPMHPYPRKSVDSKEVKLSYQQERSPSPISSVADENTGSPTSVLSAHGSDMLGSASLHQQNRCSSPTSCTTDVPSIGLAVIEKQPEIFKEED

SEQ ID NO: 2130 - protein, 156 aa, Eucalyptus grandis
FGHEFTSSPASSSSLSSSRISIGENSDKASLGYLSDGLLGRSQEKKKGVPWTEEEHRTFLVGLEKLGKGDWRGISRSYVTTRTPAQVASHAQKYFLRQVSFNKKKRRSSLFDMVDVKTAAGDRLGSLTAKPSESVPNCKMGTLMSHLQVHDARTTQ

SEQ ID NO: 2131 - protein, 49 aa, Eucalyptus grandis
MVQEVRKGPWTEQEDFQLVCFVGLFGDRRWDFIAKVSGLKVAGENNRIE

SEQ ID NO: 2132 - protein, 151 aa, Eucalyptus grandis; identical to SEQ ID NO: 651

SEQ ID NO: 2133 - protein, 133 aa, Eucalyptus grandis
MGSRTRVGGGGDDGRVVNGMPSFVPQLPTSNSMGSEGNSIRSSRITDFGTLEQSLGYRIEDAVDLSRNPVFNQMKSSAQALGADVQFGSLNKSLSSSDRNLSVNIVGSQTLSMHRESQSNLVSIPGAHRENWG

SEQ ID NO: 2134 - protein, 150 aa, Eucalyptus grandis
MPPPRAATPDVAGDESSGADAGAGEIMLFGVRVVVDSMRKCVSLNNLSQYQHPQDANPPNASGGSGGNKEEAAKGYASADDAAHNPGGGRERKRGVPWTEEEHRLFLLGLQKVGKGDWRAISRNFVKTRTPTQVASHAQKYFLRRSNLNR

SEQ ID NO: 2135 - protein, 125 aa, Eucalyptus grandis
ENVASGSTERPRIRHQHSQSMDGSTSIKPEMLMSGSEDASAADAKKAMSAAKLAELALIDPKRAKRIWANRQSAARSKERKMRYIAELERKVQTLQTEATTLSAQLTLLQRDTNGLTAENSELKL

SEQ ID NO: 2136 - protein, 72 aa, Eucalyptus grandis
MADSEHSSSDDTYVDSREETSEESKLDFSEDEETLVIRMYNLVGERWSLIAGRIPGRTAEEIEKYWNSRYST

SEQ ID NO: 2137 - protein, 135 aa, Eucalyptus grandis; identical to SEQ ID NO: 665

SEQ ID NO: 2138 - protein, 123 aa, Eucalyptus grandis
DTEDSKKKERHIVTWSQEEDDILREQIGIHGTENWSIIASKFKDKTTRQCRRRWYTYLNSDFKKGGWSPEEDVLLCEAQKIFGNRWTEIAKVVSGRTDNAVKNRFTTLCKKRARYEALAKENT

SEQ ID NO: 2139 - protein, 126 aa, Eucalyptus grandis
MGRQPCCDKLGVKKGPWTAEEDRKLVNFILTHGQCCWRAVPKLAGLRRCGKSCRLRWTNYLRPDLKRGLLNEAEESLVIDLHATLGNRWSKIAARLPGRTDNEIKNHWNTHIKKKLIRMGIDPVTH

SEQ ID NO: 2140 - protein, 108 aa, Eucalyptus grandis
PGSRSSNRRVERKKGNPWTEEEHRRFLIGLQKLGKGDWRGIARDFVTTRTPTQVASHAQKYYIRQSNAGRRKRRSSLFDMAPDMVCLLYDVASAHSLHSVQISGSCMF

SEQ ID NO: 2141 - protein, 109 aa, Eucalyptus grandis
MRKPCCDKQDTNKGAWSKQEDQKLIDYIRKHGEGCWRTLPKAAGLLRCGKSCRLRWINYLRPDLKRGNFAEDEEDLIIKLHALLGNRWSLIAGRLPGRTDNEVKNYWNS

SEQ ID NO: 2142 - protein, 65 aa, Eucalyptus grandis
SPEEDEKLFNYITRFGVGCWSSVPKLAGLQRCGKSCRLRWINYLRPDLKRGMFSQEEEDLIVSLH

SEQ ID NO: 2143 - protein, 121 aa, Pinus radiata
AKSYLGSLTETIQSLNAELERTRSELVEAKKREEEIISKEAERVEKNKREVENLELNLLQTTAEAGRAKLELETAYEEVQSARLETAQLRAALEATEGKFEAMLSETRLEAEHVKGAIEKY

SEQ ID NO: 2144 - protein, 71 aa, Pinus radiata
EILVTQIEQLQRKERMFSEENNFLRKRIVDPHSVLTTPASGSGSLQRSEVETQLVMRPPSSNADFLFNSSH

SEQ ID NO: 2145 - protein, 110 aa, Pinus radiata; identical to SEQ ID NO: 946

SEQ ID NO: 2146 - protein, 50 aa, Pinus radiata
LRGANGCTIPSIGLTSIERVEVQTQLVMRPPHATEMDDNFMDVDNVPLSG

SEQ ID NO: 2147 - protein, 168 aa, Pinus radiata
EDGSLVICERSLSAAQGMPMVSQSQSFVHGELLSSGYLIRPCEGRGALVIMVDHRNLEASSVPEALRPLYESSTFFAQKMTVEASYHLQGKVQPEMISLSKKLQQPCNVRSYSQRLCRGFNEAVNTLPDDGWMSLSKDGLGDVTICESFVKLPEPNASQIAYVNSMGT

SEQ ID NO: 2148 - protein, 120 aa, Pinus radiata
ENESLRARLRHMNGDDINSLKLPELFHLEQQLETAATQVRRRKDQVLDNEKIKRRNKMRRKEDENIILHEMLDQHHGQMEEDNAQINFLFCQPLNRSDTTFPASLLRLQPNQPNLQDIGY

SEQ ID NO: 2149 - protein, 165 aa, Pinus radiata
SPQVEHRPFSPHEDATIIQAHARHGNKWATIARLLPGRTDNAIKNHWNSTLRRRYHGEKDQSNGLAVNLESAAEDKETMTPMTPVTATATATATAMPVALVFPTAADNVRKRSNSSCSANDNPGDAEVESCRLKRLNFSESPSSSENINNNNNNEEAVSGHCNSA

SEQ ID NO: 2150 - protein, 68 aa, Pinus radiata; identical to SEQ ID NO: 990

SEQ ID NO: 2151 - protein, 152 aa, Pinus radiata
QAGLQRCGKSCRLRWINYLRPDLKRGTFSPQEENLIVELHSVLGNRWSQIATHLPGRTDNEIKNLWNSCIKKKLRQRGIDPNTHRPLSEVNAEAGDSKNDNSNKEVETQAAMDESHVSAGNEFKHLNAIPRADTANPKFFHVPVEDNTLIAS

SEQ ID NO: 2152 - protein, 89 aa, Pinus radiata
MRCTRWQGLPFSSKPKVKKGLWSPEEDEKLINYMMKNGLLGCSWSYVAKQIGLQRCGKSCRLRWTNYLRPGLKRGAISPEEEQLIIHLQ

SEQ ID NO: 2153 - protein, 94 aa, Pinus radiata
MGRAPCCDKANVKKGPWSPEEDTKLKAFIEQHGTGGNWIALPQKAGLKRCGKSCRLRWLNYLRPDIRHGGFSEDEDNIICSLYASIGSMVSIIA

SEQ ID NO: 2154 - protein, 217 aa, Pinus radiata; identical to SEQ ID NO: 952

SEQ ID NO: 2155 - protein, 113 aa, Pinus radiata
LGWGRQPAALRTFSQRLCKGFNEAVNGFTDDGWSLMGNDGMEDVTILVNSSPSKLFGQQFASSDGLPALGGGILCAKASMLLQNVPPALLVRFLREHRSEWADSNIDAYSAAS

SEQ ID NO: 2156 - protein, 107 aa, Pinus radiata
MGRSPCCEKAHTNKGAWTKEEDDRLIAHIRTHGEGCWRSLPKAAGLMRCGKSCRLRWINYLRPDLKRGNFSEEEDELIIKLHSLLGNKWSLIAGRLPGRTDNEIKNY

SEQ ID NO: 2157 - protein, 124 aa, Pinus radiata
LWLRFSGMDRSNSATGEEDVLSRCRERKRFMKLAIENRYKLATAHVAYMDSLRRMGTGLRLFAEGETMSESSYSTSPIGTSELAVVLPEKSVSPSPFPSSSPSLSQPQSPRSERAESRSPLDSF

SEQ ID NO: 2158 - protein, 110 aa, Pinus radiata
DGLVQNSRERKKGVPWTEEEHKMFLLGLHKLGKGDWRGISRNFVTSRTPTQVASHAQKYFLRQSNLNKRKRRSSLFDISTDSMEDCYQGIPELSPVMHDLSLGQNSSLTS

SEQ ID NO: 2159 - protein, 175 aa, Pinus radiata
SSPVSKPKLRKGLWSPEEDDKLINYMMKNGQGCWSDVAKQAGLQRCGKSCRLRWINYLRPDLKRGAFSPQEEQLIIHLHSILGNRWSQIAARLPGRTDNEIKNFWNSCIKKKLKHLSASTNNSKSISAPNRTSTMNSSITPFSESSAEPLEVMATRYQPSNAFNHEVPTAENQVL

SEQ ID NO: 2160 - protein, 78 aa, Pinus radiata
MGRAPCCEKVGLKKGPWTPEEDQKLLAYIQEHGHGSWRALPQKAGLLRCGKSCRLRWTNYLRPDIKRGKFNPQEEQTI

SEQ ID NO: 2161 - protein, 159 aa, Pinus radiata
RTPRCDQMGLKKGPWTPEEDQILISYINKHGHGNWRALPKQAGLMRCGKSCRLRWTNYLRPDIKRGNFSLKEEQTIIHLHQILGNRWSAIASHLPGRTDNEIKNVWNTHLKKRLLQIGVDPVTHAPRGYNVSNCYTAVNIRDHHGEQADHQLQSHVCVS

SEQ ID NO: 2162 - protein, 49 aa, Pinus radiata
TPEEDRILISYIKRNGHGKWLALPKQAGLSRCGKSCRLRWTNYLRPNIK

SEQ ID NO: 2163 - protein, 78 aa, Pinus radiata
MGTGEEATPTKPAAKPSSSSQETPTTPVYPDWAAAFQAYYGPGATPPPPAFFASTVGSAPTPHPYMWGGQPLMPPYGT

SEQ ID NO: 2164 - protein, 113 aa, Pinus radiata; identical to SEQ ID NO: 935

SEQ ID NO: 2165 - protein, 107 aa, Pinus radiata
TKAAIKRLQSQIMVAFQAVDTTSAAILKLREDELYPQLVELSKGLMQMWRAMYECHQVQNHIVQQVRHLGNLASAEATSSYHQQATIQLEAQVTAWYDSFCRMITSQ

SEQ ID NO: 2166 - protein, 38 aa, Pinus radiata
MGAPKQKWTSEEEGALRAGVEKYGAGKWQTILKDPEFA

SEQ ID NO: 2167 - protein, 158 aa, Pinus radiata
SGHMDGGSGEDQDAADQDHDHDHDHDHEQQQTRRKRYHRHTARQIQEMEALFKECPHPDDKQRQRLSIELGLKPRQVKFWFQNRRTQMKAQQDRSDNAILRAENENLRNENVALREAIKNGACPNCGGSTSLGEMPGFDEHHFRIENTRLKEELDRVS

SEQ ID NO: 2168 - protein, 122 aa, Pinus radiata
MGCTQGQRQGEWEGKGVPSNSSRRSLRKGLWSPDEDIELTTYIMRKGLMGCWNYIAKQAGLQRCGKSCRLRWINYLRPGLKRCAISPQEERLIIQLQSSLGNRWSQIAAHLPGRTDNEVKNY

SEQ ID NO: 2169 - protein, 101 aa, Pinus radiata
MGRSPCCEKAHTNKGAWTQQEDTRLVAHIRAHGQGGWSSLPKAAGLLRCGKSCRQRWINYLHPDLKRSNFSEEEDELIVRLHSLLGNKWSLIAGRLPGRTD

SEQ ID NO: 2170 - protein, 133 aa, Pinus radiata
RLLPGRTDNAIKNHWNSTLRRRYHGEKDQSNGLAVNLESAAEDKETMTPMTPVTATATATATAMPVALVFPTAADNVRKRSNSSCSANDNPGDAEVESCRLKRLNFSESPSSSENINNNNNNEEAVSGHCNSA

SEQ ID NO: 2171 - protein, 120 aa, Pinus radiata
MRCKTGQAQGVLEVEGTHPAPSKPKLRKGLWSPVEDNQLTNYILRRGLVGCWNYVAKQAGLQRTGKSCRLRWINYLRPGLKRHPISRQEEQLIIELQSILGNRWSQIAAQLPGRTDIEIK

SEQ ID NO: 2172 - protein, 155 aa, Pinus radiata
QQLESSRIKLKQIEQELERVKQQGISINGHLGDHNGSGAAAFDMEYGRWVEEQNRQARELRASLQAHLTDSELCVLVDNAIAHYDELFRMKGAASKLDVFHLMSGMWKTPTERCFMWMGGFRPSELLKILTPQIEPLTEQQSFAVSSLKLSSQQA

SEQ ID NO: 2173 - protein, 63 aa, Pinus radiata; identical to SEQ ID NO: 959

SEQ ID NO: 2174 - protein, 76 aa, Pinus radiata
RARKTEILVTEIEQLQRKEWILSEENAFLGKKFVHPHSVSKTPGSESGSIQNSEVETQLVMRPPCTNAHFLINSSH

SEQ ID NO: 2175 - protein, 161 aa, Eucalyptus grandis
RESANCASRVADRRENRRRRDMGNQKLKWTKEEEEALLAGIAKHGAGKWKNILKDPEFAPALVNRSNIDLKDKWRNLSVGTSGQGSRDKQRLSKVKSLMAAPQSSTVPLNPQAHAASTDVALVNSSNSFQDGKNYSLWVSVLLFLFSNGNLFYFYPLLSFL

SEQ ID NO: 2176 - protein, 31 aa, Eucalyptus grandis
TRQSARALLAIHDYFSRLRALSSLWLARPRE

SEQ ID NO: 2177 - protein, 191 aa, Eucalyptus grandis
MASRKEVDRIKGPWSPEEDEALRLLVQKHGPRNWSLISKSIPGRSGKSCRLRWCNQLSPQVEHRAFTPEEDDIIVRAHARFGNKWATIARLLSGRTDNAIKNHWNSTLKRKCSPPLSPLAEEGNNRAFDAAAGYDGDLSPRERPAKRSASAGPCLSPGSPSGSGMSDSSVHFVYRPVAKTGPVVPPTVEAT

SEQ ID NO: 2178 - protein, 113 aa, Eucalyptus grandis
QVAQLRVENSTLLKRLSDISQKYNVAAVDNRVLKADVETLRAKVKMAEETVKRVTGLNPMLHVMSDMSSVGVPPFDGSPSDTSADAAVPVRDDPKHQFYQTNSSNPASSADDM

SEQ ID NO: 2179 - protein, 314 aa, Eucalyptus grandis
MKRLGSSDSLGALMSICPPSEELQHSPRNGNPIYHSRDLQSMLELGLDEEGCVEDQSAGGGGHVGGEKKRRLSIDQVKALEKNFEVENKLEPERKVKLAQELGLQPRQVAVWFQNRRARWKTKQLERDYGVLKSSYEALKLSYDALKHDNEALHKEIKELKSKLREEDDNPESNLSVKEEVIIPGHDVSDKIRAADDGDDDTKRSPPPPITAPPRELSFNNGGLKDGSSDSDSSAIVNEENAATSSSSPNPAVQSHGGFLKFMGSSSSSASPPPSPPASFGGCFSFQFQRAYQPQPQPPHHHHHHSPYVKMEEH

SEQ ID NO: 2180 - protein, 94 aa, Eucalyptus grandis
ERYKSACSDSSHPQSVSDVNTQFYQQEASKLRRQIREIQVSDRHLLGEGISDLSFKDLKNLESKLEKSISRVRSKKNEMLFAEIEYMQKRGLVQ

SEQ ID NO: 2181 - protein, 83 aa, Eucalyptus grandis
ENKINRQVTFAKRRNGLLKKAYELSVLCDAEVALIIFSTRGKLYEFCSSPSMLKTLDRYQKCSYGSVEVNKPSKELENAYREY

SEQ ID NO: 2182 - protein, 108 aa, Eucalyptus grandis
MGRGKIEIQKIENDTNRQVTYSKRRNGIFKKAHELTVLCDARVSILMLSGNKKLHEYISPTTTTKRMIDDYQKALGIDLWTTHYDRMQEELRKLKEVNNNFRKEIRQI

SEQ ID NO: 2183 - protein, 40 aa, Eucalyptus grandis
RNLMGEDLGTLNSKELEQLERQLEASLKHIRSTKTQCMLD

SEQ ID NO: 2184 - protein, 161 aa, Eucalyptus grandis
MVFPTQATPEESPQRKMGRGKIEIKRIENTTNRQVTFCKRRNGLLKKAYELSVLCEAEVALIVFSSRGRLYEYANDSVKATIERYKKACSDSSSSGSVSEANVQFYQQESAKLQQQINNMQNNNRQLVGDSIAGMNMKDMKTTEQKLEKAIAKIRAKKNAI

SEQ ID NO: 2185 - protein, 92 aa, Eucalyptus grandis
QHKEQMLVEANRELRKKLEESNTRIPLRLGWEAEDHNNISYSRLPMQSQGLIFQPLGGNPTLQIGYNPAGSNELNVSAADQHPNGFIPGWML

SEQ ID NO: 2186 - protein, 113 aa, Eucalyptus grandis
GSKELESLERQLDGSLKQIRSRRTQYMLDKLTDLQHREQLLHEANRTLNQRLMEGYQVNALQLNQHAEEVGGYGHPPPPPLPPQPLAQPHSEAFFNPLECEPTLQMGYQPDPV

SEQ ID NO: 2187 - protein, 309 aa, Eucalyptus grandis
MTRRCSHCCNKGHNSRTCPVRGGGGDGGGAAAAPSSSSPSTSSSGAAAAAAASASGGGVKLFGVRLTDGSIMKKSASVGCLSAAHYHSSSSAAASPNPGSSPIDGSDGYLSDDPAPGSRSSNRRVERKKGNPWTEEEHRRFLIGLQKLGKGDWRGIARDFVTTRTPTQVASHAQKYYIRQSNAGRRKRRSSLFDMAPDMATADQPSHPEETFLPPLVRLNDDTNSTTSTSMGLDLERTPMETSHPETSEGGGDVAMESIDQVPLVPCYFPYYLPLPFPMWPPNMAPPEDGRVVETSHHRVLKPIPVIPK

SEQ ID NO: 2188 - protein, 123 aa, Eucalyptus grandis
WDTSSSPPTLLESVDNFILSPARTGKAESECLSPRNSGLLDALVHESKTMSSAKNNSPEKSTNSSALTPGDISSSTLDICKSEWEEYGDPISPPGHSATSVFNGCTPLSTSGSSLDEQPYPDT

SEQ ID NO: 2189 - protein, 136 aa, Eucalyptus grandis
HIRRKLLNRGIDPATHRPLNEPAQDATTISFAAAPSKQEPRDDAIAAALGYKNENNPTTTAATVQEKCPDLNLELRISPPCQQQHQPDASMGMVEGNHCFACSLGLQNSKECSCRRGASGGSSAHGGYDFLGLKTS

SEQ ID NO: 2190 - protein, 109 aa, Eucalyptus grandis
MEFPSEFSEASSQKRIGGRGKIEIKRIENTTNRQVTFCKRRNGLLKKAYELSVLCDAEVALIVFSSRGRLYEYANNSVRGTIERYKKASSDSSTSHSPFPEVEHSSFIQ

SEQ ID NO: 2191 - protein, 116 aa, Eucalyptus grandis
MGRGRVELKRIENKINRQVTFSKRRNGLLKKAYELSVLCDVEVALLIFSSRGKLYEFGSAGPSGINKTLERYQRDNFTPQDNVAEHETQQNWFQEISKLKAKYELFNKLQKHLLGK

SEQ ID NO: 2192 - protein, 98 aa, Eucalyptus grandis
MARGKVQMKRIENPVHRQVTFCKRRAGLLKKAKELSVLCDADIGLFIFSPHGKLYELATKGTMKGLIERYMKTTQSQAALTEEATPSQPLDAKEEINI

SEQ ID NO: 2193 - protein, 198 aa, Eucalyptus grandis
MGRGKVELKRIENKINRQVTFAKRRNGLLKKAYELSVLCDAEVALIIFSNRGKLYEFCSSSSMMKTIEKYQKCSYGSLETNCSINEMQNSYQDYLKLKTRVEVLQRSQRNLLGEELGPLNSKELEQLEHQLENSLKQIRSAKTQFMFDQLAHLQHKEQMLVEANRELRKKLEESNTRIPLRLGWEAEDHNNISYSRLP

SEQ ID NO: 2194 - protein, 153 aa, Eucalyptus grandis
MRKPCCDKRDTNKGAWSKQEDQKLIDYIQKHGEGSWRTLPQAAGLLRCGKSCRLRWINYLRPDLKRGNFAEDEEDLIIKLHALLGNRWSLIAGRLPGRTDNEVKNYWNSHLRRKLLKMGIDPNNHRLNQNLPRSQTRMPRQHFLIQYEDHMTL

SEQ ID NO: 2195 - protein, 104 aa, Eucalyptus grandis
EALQQSLVDTLSSTTLSPTGSGNVAEYMGQMAIAMGKLATLENFVHQADLLRQQTLQQMHRILTTRQAARALLVINDYISRLRALSSLWLARPRTENICSAKLF

SEQ ID NO: 2196 - protein, 25 aa, Eucalyptus grandis
DPLMKPWQIPCPIQPIIASADLFEC

SEQ ID NO: 2197 - protein, 87 aa, Eucalyptus grandis
MGRRKIEIQPITHERNRSVTFLKRKNGLFKKAYELGVLCSVDVAVIIFEDRPGHSPKLYQYSSRGIQDIVQRHLHHDGETDNRGPGD

SEQ ID NO: 2198 - protein, 107 aa, Eucalyptus grandis
RDRTFLVGLEKLGKGDWRGISRSYVTTRTPAQVASHAQKYFLRQVSFNKKKRRSSLFDMVKNQCSYKLLPSYRLSSISLMGFDKFLLYKVDVKTAAGDRLGSLTAKP

SEQ ID NO: 2199 - protein, 107 aa, Eucalyptus grandis
MTLEEFLVRAGVVREDTQMMARPGDNGVHEEMSQFTSNGLASSAAAGNDFIFSSKPAGSSLDFIGTRPTQLQQQPQPQPLEPPAPLFPKPETVSFATSVHLPNTASY

SEQ ID NO: 2200 - protein, 150 aa, Eucalyptus grandis
ANAPLRIAMNSNASSNPQSMATSTTSATTPAAGGDGGKKVRKPYTITKSRESWTEEEHDKFLEALQLFDRDWKKIEDFVGSKTVIQIRSHAQKYFLKVQKNGAVAHVPPPRPKRKAAHPYPQKASKNVLVPLQASMAQPSSTNPAFTITP

SEQ ID NO: 2201 - protein, 171 aa, Eucalyptus grandis
MGRSPCCESEHMNKGAWSKEEDERLIAYIKRHGEGCWRSLPKAAGLLRCGKSCRLRWINYLRPDLKRGNFSDEEDELIITLHSLLGNKWSLIAARLPGRTDNEIKNYWNTHIKRKLHARGIDPQTHRPLRLHQHCWCWCCCHFTLSVLTLTTAATRPRLTRRLVKNYHHHQ

SEQ ID NO: 2202 - protein, 98 aa, Eucalyptus grandis
MNSPLAQLVNPRRMHTYEPFDQFPMWGDTFKADKVKNLEASSSVIVHAVDDGLDKKFEYVSHESAENSSSRSDQEANRPDKVQRRLAQNREAARKSRL

SEQ ID NO: 2203 - protein, 111 aa, Eucalyptus grandis
MNSPLAQLVNPRRMHTYEPFDQFPMWGDTFKADKVKNLEASSSVIVHAVDDGLDKKFEYVSHESAENSSSRSDQEANRPDKVQRRLAQNREAARKSRLRKKKYVQQLESSR

SEQ ID NO: 2204 - protein, 162 aa, Eucalyptus grandis
MASSSSVASARKDADRIKGPWSPEEDEALQRLVQSYGPRNWSLISKSIPGRSGKSCRLRWCNQLSPQVEHRPFTPEEDEAIVRAHARFGNKWATIARLLNGRTDNAVKNHWNSTLKRKCSSTCSAGGDDADALAEQQPLKRSASLGTPTGGNNAVSDLFFSP

SEQ ID NO: 2205 - protein, 92 aa, Eucalyptus grandis
MAKEKIKIKKIDNLTARQVTFSKRRRGLIKKAEELSVLCDADVSLIVFSATGKLYDFSSSRQMKGEDLEGLNVEELDQLEKKLEAGLSLVIK

SEQ ID NO: 2206 - protein, 148 aa, Eucalyptus grandis
MRKPDASGKNSSNSNANKLRKGLWSPEEDDKLMNYMLNNGQGCWSDVARNAGLQRCGKSCRLRWINYLRPDLKRGAFSPQEEELIIHLHSILGNRWSQIAARLPGRTDNEIKNFWNSTIKKRSRTRHHLLVDTRQTRAILLASDVKDV

SEQ ID NO: 2207 - protein, 73 aa, Eucalyptus grandis
APEIAPPLAAPRGGHHRRAHSEVNFRIPEDLDLGPDPFENGPSGSFEDFGSEDDLLSTYMDIEKFGSSSTRAG

SEQ ID NO: 2208 - protein, 147 aa, Eucalyptus grandis
SENVSGGAIERPRATGKLAAPVNSPSMSSSLDLKNSCMDANANPVSILQPGVVPPEAWLQVMSLCGRLLKIFPWKASTSVLSAVSSSCSLQYHRLCFSKFALCKNERELKRERRKQSNRESARRSRLRKQAETEELGKKVDSLSAEN

SEQ ID NO: 2209 - protein, 115 aa, Eucalyptus grandis
FFLYIISLFLVRENSERSREGTSSNGDGKSEVQGKVAGEVDAASENVSGGAIERPRATGKLAAPVNSPSMASSLDLKNSCMDANANPVSILQPGVVPPEAWLQNERELKRERREQ

SEQ ID NO: 2210 - protein, 192 aa, Eucalyptus grandis
MGRQPCCDKSGVKKGPWTAEEDKKLINFILTNGHCCWRAVPKLAGLRRCGKSCRLRWTNYLRPDLKRGLLSEAEEQLVIDLHARLGNRWSKIAARLPGRTDNEIKNHWNTHIKKKLLKMGIDPVTHEPLNKPQKTPSEHDPEASLSSSQADPTSESPANTHQPNNAHADEVQLVLVLPVGLVRRELLLRQGR

SEQ ID NO: 2211 - protein, 89 aa, Pinus radiata
LSRNMDDVFVQRCNRNFTARDRLISKERRNFGWVCGVTEEEEELIIRMYKLVGNRWSLIAGRLPGRKAEEIERYWKMRSINAAPLKPNT

SEQ ID NO: 2212 - protein, 237 aa, Pinus radiata
MVKELLMMCSNCGHSGHSSRACPDRGSVKLFGVRLIATDDGMACMRKSLSMGNLGHYRSLYNVNHCSGTSECGSADQDGYLSDGFVHSSSNARERKKGVPWSEEEHRMFLYGLEKLGKGDWRGISRNFVTTRTPTQVASHAQKYFLRQSNLNKRKRRSSLFDMCPHDSHVTSSFRREDSLGNLYEFSPKHSALGVSPNFELYSFGVSPTLSLGRSLQPVEAVLEEKAAHYHPVNSEE

SEQ ID NO: 2213 - protein, 55 aa, Pinus radiata
WLQLCSGIDEHAAGFCSQLVFAPIDASFADDAPLAPSGFRVIPLESGSECFSSKT

SEQ ID NO: 2214 - protein, 119 aa, Pinus radiata
GVLKFPCFDLITMNLMESFEAKGKGEKRRTVRGKTQLKRIENGTSRQVTFCKRRNGLLKKAYELSVLCDAEVALIVFSPRGKLYEFANPSMQKMLERYEKCSEGSNPTSTAKEQDVQCL

SEQ ID NO: 2215 - protein, 146 aa, Pinus radiata
PKQDQKLVTYIQEHGHGSWRALPQKAGLLRCGKSCRLRWANYLRPDIKRGKFTVQEEQTIIQLHALLGNRWSAIATHLPKRTDNEIKNYWNTHLKKRLLQMGIDPVTHKPKSESIMVPGVQSSNGSSNLSHMAQWESARLEAESKA

SEQ ID NO: 2216 - protein, 106 aa, Pinus radiata
GIFIGGSCVGGDQSHSMSGNGALAFDMEYARWLDEHHRQINELRSAVNSHVGDNELRGLVEGVMGHYDEIFRLKTVASKADVFHLVSGMWKTPAERCFMWMGGFRP

SEQ ID NO: 2217 - protein, 114 aa, Pinus radiata; identical to SEQ ID NO: 937

SEQ ID NO: 2218 - protein, 126 aa, Pinus radiata
WNLIEEKIEGRSGKSCRLRWFNQLDPRINRRPFTEEDEEKLLAAHRLYGNKWAMIARLFPGRTDNAVKNHWHVIMARRYREQSSAFGRRKLPQVHRREKRACTDDETRMGSSSCNMWVDKYSSLKS

SEQ ID NO: 2219 - protein, 123 aa, Pinus radiata
LIAYIRANGEGSWRSLPKAAGLPRCGKSCRLRWINYLRPDLKRGSFTEEEDELIIKLHSVVGNKWSLIAGRLPGRTDNEIKNYWNTHIKRKLLIKGIDPQSHRPLGQPYSSNNMPVSRLFLTS

SEQ ID NO: 2220 - protein, 176 aa, Pinus radiata; identical to SEQ ID NO: 926

SEQ ID NO: 2221 - protein, 119 aa, Pinus radiata
LYQCQALFENGAVEKLSRTYNDLYDDLKEEILSWLPVECVCRFRSVSKQWNNLLSSHNFIKKVWRKKPANMNPWLVLHPVNSSYCLAYCFFTRTWKTTSSISIENANNYGENGILGISC

SEQ ID NO: 2222 - protein, 124 aa, Pinus radiata
DKKLINFLTTHGQCCWRTVPELAGISRCGKSCRLRWTNYLRPDLKRGVFSESEEKLILDLHSRVGNRWSKIASFLPGRTDNELKNYWNTHIKKKLKRMGLDPGDAQAISETLPQPAPVAENNDV

SEQ ID NO: 2223 - protein, 175 aa, Pinus radiata
MKGKSPGHDEPDRIKGPWSPEEDAALQHFVQKYGPRNWSLISKAIPGRSGKSCRLRWCNQLSPQVEHRPFTPEEDATIVRAHAQHGNKWATIARMLSGRTDNAIKNHWNSTLRRRCQGGGALVIDDEISSGADGFRKRNLSEDADASRKFKKLSLGTTTTTTTTEPSTSSASDRS

SEQ ID NO: 2224 - protein, 103 aa, Pinus radiata
MSSRSCSLCGLNGHNSRTCVGSGVMLFGVRLTDGPMRKSASMNNLSNLSQYEHSDPAEVAAEGFDGYVSDDLVHSSSNARERKRGVPWTEEEHRMFLVGLQRV

SEQ ID NO: 2225 - protein, 96 aa, Pinus radiata
MSSRSCSLCGLNGHNSRTCVGSGVMLFGVRLTDGPMRKSASMNNLSNLSQYEHSDPAEVAAEGFDGYVSDDLVHSSSNARERKRGVPWTEEEHRMF

SEQ ID NO: 2226 - protein, 131 aa, Pinus radiata
RGRVQLRRIENKISRQVTFSKRRNGLMKKAAELSILCDAEVALIVFSNKDKLYEFASSSMTKILERYRKRSNLIQDIGKDPQNSDIELTRLKEEVDRLQRSRRHLLGEDLHQLGATDLQHLEQQLEEALQK

SEQ ID NO: 2227 - protein, 49 aa, Pinus radiata
MPSIMEKQNSGEDSDSKGQLDNGKYVRYTNEQVETLERAYNECSKPSTR

SEQ ID NO: 2228 - protein, 128 aa, Pinus radiata; identical to SEQ ID NO: 980

SEQ ID NO: 2229 - protein, 181 aa, Pinus radiata
EDLDDCIHPPEKKRRLTADQVQFLERSFEIENKLEPERKIQLAKELGLQPRQVAVWFQNRRARWKTKQLERDYDILKSRYENLRVDYDSLLKEKDKLRAEVTFLTDKLHDSDHEALTKDSESADKKVYPQPASHSDCVGEPERSTAAKDTPPGCKHEDLLSSGTDSSGVLDEDSPHHVDCG

SEQ ID NO: 2230 - protein, 107 aa, Pinus radiata
MGRSPCCEKAHTNKGAWTKEEDDRLIAHIRTHGEGCWRSLPKAAGLMRCGKSCRLRWINYLRPDLKRGNFSEEEDELVIKLHSLLGNKWSLIAGRLPGRTDNEIKNY

SEQ ID NO: 2231 - protein, 125 aa, Pinus radiata
KKGVPWTEEEHRQFLMGLRKYGKGDWRSISRNFVVSRTPTQVASHAQKYYIRLGSDNKNKRRSSIHDITTVHGTDRMPSPLLHVSNRQTNSPSTQAEMNHSPCLDISISDFTRTSNKLFGTSNRW

SEQ ID NO: 2232 - protein, 150 aa, Pinus radiata
MTRKCSHCGNNGHNSRTCPNRGGVKLFGVRLTDGPIRKSASMGNLMMMSNPSSPADPSEPASAAAAAAAAAASGYLSDGLVEASTSSNSRERKKGVPWTEEEHRMFLLGLQKLGKGDWRGIARNFVITRTPTQVASHAQKYFIRQSNMTR

SEQ ID NO: 2233 - protein, 102 aa, Pinus radiata
MKMSLPSNVLTLSADSNSNSNSISSSGDELAAKVRKPYTITKQRERWSEDEHLKFLEALKMYGRAWRRIEEHIGTKTAVQIRSHAQKFFSKLVRGSSNKGVS

SEQ ID NO: 2234 - protein, 85 aa, Pinus radiata
GIDMNRGPATNESEYSSVFQADALRTIDTGSVVVKRERERTFELEAERDRTCDVSSRTSDEEEIGSTRKKLRLSKEQSALLEESF

SEQ ID NO: 2235 - protein, 115 aa, Pinus radiata
NLESLTLKELQQLEKQLGRAIKKIYNKKMKIISQCCKSLSEKVRSLEEENSELLTKLIPRADSSTSGAALFVDTSMPKSHSATEAWRQLLQRVLVTAAKMATTPPARHSNSRPNH

SEQ ID NO: 2236 - protein, 88 aa, Pinus radiata
GKATSGSANEAMSQSGDSGSDGSSEGSEEYNTQTESQVARKRSFDQMIVDGANAQSTNIQSYNSQAGEPYVTSGGHAMGNPISQAVAA

SEQ ID NO: 2237 - protein, 66 aa, Pinus radiata
QLKWKERILTEENLFLRKKCGDEHVDCSAFRTPPAQLRSIQNIDVETQLVIRPPTVQQHPDVDSPR

SEQ ID NO: 2238 - protein, 176 aa, Pinus radiata
MGRTPCCLKVGLNRGPWTPEEDLCLSNYIEAHGEGGWRTLPKKAGLLRCGKSCRLRWMNYLRPDVKHGHILPEEEDLILRLHRLLGNRWSLIAGRMPGRTDNEVKNYWNTHLSKKLISQGIDPRTHKPLSESEDICSSPGNSEVSRKSQRENNAEIPRKVADGAVDIQDKEEDITE

SEQ ID NO: 2239 - protein, 105 aa, Pinus radiata; identical to SEQ ID NO: 924

SEQ ID NO: 2240 - protein, 78 aa, Pinus radiata
MSNGRLCEDLDRIKGPWSPEEDASLQRLVQKYGPRNWTLISKGIPGRSGKSCRLRWCNQLSPQVEHRPFTPSEDAAIL

SEQ ID NO: 2241 - protein, 67 aa, Pinus radiata
MGRALGRTEIKRIENEVSRNVSFRKRRRGLLKKAAELSILCDATVGVVVFSPAGKLSEYASTSEQMD

SEQ ID NO: 2242 - protein, 131 aa, Pinus radiata
IRNPTNRHSSFYKRKGGLLKKAFELAVLCDAEVALIIFSETGRIYEFASHDDVTTVLAKYRIQTKTAGNAMPSSLQKTEFDQLQVRMLQEKIDNLEKTKKHMVGDNLESLTWKELQQVEKKLSKATKIIVA

SEQ ID NO: 2243 - protein, 29 aa, Pinus radiata
QPVAPESIVPPHQPPHNQTPNQYMQGWWV

SEQ ID NO: 2244 - protein, 107 aa, Pinus radiata; identical to SEQ ID NO: 2156

SEQ ID NO: 2245 - protein, 168 aa, Pinus radiata
TAEEDRKLVNFITLHGHGCWREVPKLAGLLRCGKSCRLRWTNYLRPDLKRGLLSESEEKLIIDLHAAIGNRWSRIAAQLPGRTDNEIKNYWNTRIKKKLRQMGIDPVTHKPLTQMQMQSTPAQTLLLQENDTEQQQQEQHNEPDPDQNQSSNGTVETLVSRAREPHDH

SEQ ID NO: 2246 - protein, 164 aa, Pinus radiata
SDGTTTMSTYERKASLREFYAVIYPSLLQLEGGITEMEDNKQKLICKERYKKRVDEERRHLSELDLEREKECGICMETQTKVVLPNCSHAMCLNCYREWHARSESCPFCRDSLKRVNSTDLWIFTSNEEVVDMETLGRENLKRLFNYIDKLPLIVPESLFYVYD

SEQ ID NO: 2247 - protein, 414 aa, Pinus radiata
MGRHSCCYKQKLRKGLWSPEEDEKLLRHISQYGHGCWSSVPKQAGLQRCGKSCRLRWINYLRPDLKRGAFSQDEEDLIIELHAALGNKWSQIAANLPGRTDNEIKNLWNSCLKKKLRQRGIDPVSHRPLSEVENSDDKDATSGQTQDKVSRGSVELLSQLNPQFSSSTTARSSKNSNLMAPTLSKDTVADGFVSNHQENSMMNSCISDFVDNFSLQQLNYSSSDSRFSNLCFTQTGRAHGNTIFSDFNSNVISAISPPSSNSLFPTASMGFNFKPSNAVPSANSTSSASTGTADFHNSGSYFGNSLVSWGLLADCGSPDKEGSTSIHPLEVHQPGDFKWAAEYLQNPLFMAAALQNQAQEQSNLYNQIKPETQFPPDHSTTSMWDHLQGHESLDNSLNTCGKDIQRLTALLGHN

SEQ ID NO: 2248 - protein, 205 aa, Pinus radiata
MRYPAPAPASRGKSTSTATPCCSKVGIKRGPWTPEEDEVLASYVRREGEGRWRTLPKRAGLQRCGKSCRLRWMNYLRPSVKRGQIAPDEEDLILRLHRLLGNRWSLIAGRIPGRTDNEIKNYWNTHLSKKLISQGIDPRTHKPLLNHNPSSSLAAHLQDTYNASTFTPKATYPNPTVPVEETGDENDLKVGRQPAGSASKRGRCQ

SEQ ID NO: 2249 - protein, 195 aa, Pinus radiata
MDKKPDDDSGKSQDVEVRKGPWTMEEDLILINYIANHGEGSWNSLAKAAGLKRTGKSCRLRWLNYLRPDVRRGNITTEEQLLIMELHAKWGNRWSKIAKHLPGRTDNEIKNFWRTRIQKHIKQAEAFSGQSSEMSDQASTSHMSSMPEPMETYDSPPSFQGNNNMEPLPVNLSVESNEAYWSMDDLWSMQLLNGD

SEQ ID NO: 2250 - protein, 208 aa, Pinus radiata
MDKKPCYRTQDPQVRKGPWTLEEDLILMDYIANHGEGVWNSLAKAAGLQRTGKSCRLRWLNYLRPDVRRGNITPEEQLLIIHLQSMWGNRWSEIAKHLPGRTDNEIKNYWRTKIQKHIIKQSETEINDLTIPPSSANACTDHRGVSAANTIEIACSPPSDQGGSGETMLSALPPAQEPNDSACWSVEDLWPIQSLISGMGDDAQYYSV

SEQ ID NO: 2251 - protein, 147 aa, Pinus radiata
MNSTTTQFVSSRRMGMYDPIHQIGMWDENFKQNGNPNAPPALIIPMHANLDNQSEDTSHGSQDTAGKYEQETSKPYDKVQRRLAQNREAARKSRLRKKAYVQQLEASRLKLMQLEQEVDRARQQGVYMASGVDSAYPGYGGCLNSGI

SEQ ID NO: 2252 - protein, 43 aa, Pinus radiata; identical to SEQ ID NO: 611

SEQ ID NO: 2253 - protein, 54 aa, Pinus radiata
MGRSPCCEKAHTNKGAWTKQEDDRLIAHIRAHGEGGWRSLPKAAGCLPALCFLN

SEQ ID NO: 2254 - protein, 66 aa, Pinus radiata
MGRAPCCEKVGLKKGPWTPEEDQKLVTYIQEHGHGSWRALPQKAGDYEFIFSSRTCKKFSVFLFFG

SEQ ID NO: 2255 - protein, 67 aa, Pinus radiata
MGRSPCCAKEGLNRGAWTKTEDIILSEYIRIHGDGGWRSLPKKAGLKRCGKSCRLRWLNYLRPDIKR

SEQ ID NO: 2256 - protein, 226 aa, Pinus radiata
MGRAPCCSNDDRNKGAWTKEEDDRLIQYIKVHGEGCWRSLPKAAGLLRCGKSCRLRWINYLRPDLKRGFFSEDEDDLILKLHALLGNNRWSLIAGRLPGRTDNEIKNYWNSHLKRKLISMGIDPLTHRPFQKTSHHHPSPPQNVREAETTPSIGIVQDFFRCPSELSTKSEQISDAASGLAQDEQPHPNLNLNLELSIARSSVHRVAEKEDVVNSQQGESNLSEGK

SEQ ID NO: 2257 - protein, 101 aa, Pinus radiata
MGRAPCCSNGDRNKGAWTKEEDDRLIQYIKVHGEGCWRSLPNAAGLLRCGKSCRLRWINYLCPDLKRGFFSEDEDDLILKLHALLGNKWSLIAGRLPGRTD

SEQ ID NO: 2258 - protein, 412 aa, Pinus radiata
MGRTPCCEKNIGLKKGPWTPEEDQKLIDYIQSHGHGSWRALPKRAGLLRCGKSCRLRWTNYLRPDIKRGQFSFEEEQTIIELHAVLGNKWSTIAGHLPGRTDNEIKNYWNTHLKKRLLQMGIDPVTHRPRTDLLAFSNIQSSIFNTPGFGHMAQWESARLEAEARLTGEYLRQALFMAGNGSATADLLMRPCKSEFGNDQFNLTKNMGNPPWIQQPGMALDYKGAVPQSLEQFLQTNVCSASDINGGGCLSHEGGFNITKFASPCSTLDGIQIKTEPQSLCGPQVVKNDSQFLHSEGDLRKQAMLDMNVGCNVLINMNAESKVSFGHNGIITDQEYNNLGQIDNNNHLSHAATTLWPVEGQLQAIASASMPGLISSTSCTSNNIYSQPGLIPLLNSTTSSMGDTNSYREAQP

SEQ ID NO: 2259 - protein, 391 aa, Pinus radiata
MGRTPCCLKVGLNRGPWTPEEDLCLSNYIEAHGEGGWRTLPKKAGLLRCGKSCRLRWMNYLRPDVKHGHILPEEEDLILRLHRLLGNRWSLIAGRMPGRTDNEVKNYWNTHLSKKLISQGIDPRTHKPLSESEDICSSPGNSEVSRKSQRENNAEIPRKVADGAVDIQDKEEDITEDQTSAQLPENQLLETSNSQCPSVATDFVPQAPSIPSTAYSFQQSTTSSVPGGVSDSVDVNHNKGSKQVPFPLSNTACFNSSAQGVAGDYLDQYLMKNLVTNSNDLITSTVRLSSALQTAPFVGQFDSNHVFMSGNASLNEKHQMPQNSQALEMDPHHSFIAHPSEEGTYDKLNHTRCAASDQVTSFNYPYLISHTVTGSALGDFNPDIFPPFVES

SEQ ID NO: 2260 - protein, 144 aa, Pinus radiata
MGRSPCCEKAHTNKGAWTKQEDDRLIAHIRAHGEGGWRSLPKAAGLLRCGKSCRLRWINYLRPDLKRGSFTEEEDELIIKLHSFVGNKWSLIAGRLPGRTDNEIKNYWNTHIKRKLLSKGLDPQTHRPLGQPNNTPVTRPVLEH

SEQ ID NO: 2261 - protein, 255 aa, Pinus radiata
MGRSPCCEKAHTNKGAWTKEEDDRLIAHIRTHGEGCWRSLPKAAGLMRCGKSCRLRWINYLRPDLKRGNFSEEEDELVIKLHSLLGNKWSLIAGRLPGRTDNEIKNYWNTHIKRKLLNRGLDPQSHRPLGQPHNSNTTCPSLPALEHEILVFQRPRTPEIADFFQYERSESSPMEPATSKDAEEHPDLNLDLCISLPVHSPPATSRASSVDGTVDSKPNSVSCHMGLQVNYGVQCENRYCEESASGVSSFYTLVL

SEQ ID NO: 2262 - protein, 162 aa, Pinus radiata
MGTGEMGTPAKTTKASTPQEQPPTSTAMLYPDWAAAFQAYYNSGTTPPPPPAYFHSSVASSPQPHPYMWGGQPLMPPYGTLPPPYAAMYHHGSMYAHPSMPPGAHPFAPYVMTSSLSTTEGAPVGTTSGADAEGKPSEPKDQTLLKRSKGSLGSLNMLTGKI

SEQ ID NO: 2263 - protein, 193 aa, Pinus radiata
MGCNQSKVESEEEVVKSKERKQFMKESVAARNAFAAAHSASITSLKNIGAALNDYGQGESKESLSQGHLPVPHIYGDPLPPAPPLPPLLPPPRPDEHPARPLERSASAPAIALQQQAEEDRNPEANAGASIPEGEEDEVEEEEDEHLVEVSHSVTSFNPPPRPPPSSSEPPPPPLPPLTNQWDFFDDNSYFER

SEQ ID NO: 2264 - protein, 128 aa, Pinus radiata; identical to SEQ ID NO: 941

SEQ ID NO: 2265 - protein, 181 aa, Pinus radiata
MGRGRVELKRIENKINRQVTFSKRRNGLLKKAYELSVLCDAEVALIIFSSRGKLYEFGSAGMLKTLERYQKCSYVLQDATVSDREAQNWHQEVGKLKARVELLQRSQRHLLGEDLGPLSIKELQQLERQLEVALTHVRSRKTQVMLEMMDELRRKERILQEVNKSLRKKLQEAEGQAFNAM

SEQ ID NO: 2266 - protein, 107 aa, Pinus radiata
MDLMESFEAKGKGEKRRTVRGKTQLKRIENGTSRQVTFCKRRNGLLKKAYELSVLCDAEVALIVFSPRGKRYEFANPSMQKMLARYENFSEGSKATSTAKEQDVQGL

SEQ ID NO: 2267 - protein, 134 aa, Pinus radiata; identical to SEQ ID NO: 945

SEQ ID NO: 2268 - protein, 138 aa, Pinus radiata; identical to SEQ ID NO: 931

SEQ ID NO: 2269 - protein, 141 aa, Pinus radiata
MGKKRVELKRIQNPSSRHATFSKRKNGLLKKAFELSVLCDAEVALIIFSETGKIYEFASNNDMAAILGKYRVHEEGTETSSPTSLQNVKYHESGLEKLQEKLTALQKKEKNLIGEDLEVLTMKELQRLEKQLQIGIKRLVI

SEQ ID NO: 2270 - protein, 135 aa, Pinus radiata
MGKKKVEVKLIQNPTSRQGCFYNRKCGLLKKAFELSVLCDAEVALIIFSQTGKIYEFASHDDVNAILAKYRIQTGTTTNAMPSSLQNTEPETLHEETNMLGKRKKVEKLHEKINMLEKRGKNMVGENLESLTVNE

SEQ ID NO: 2271 - protein, 118 aa, Pinus radiata
MARGKTQMKKIENVTSRQVTFSKRRNGLLKKAFELSVLCDAEVGLIVFSPSGKLYEFSRPCMGKLLEKYEKNSRESGINNAAKEKDTQHSKREIANMEEKIRILESTERKMLGQNLAS

SEQ ID NO: 2272 - protein, 147 aa, Pinus radiata; identical to SEQ ID NO: 971

SEQ ID NO: 2273 - protein, 113 aa, Pinus radiata
MGRGKIEIKKIENSVHRQVTFCKRRGGLMKKAYELSVLCDADVALIVFSSRGKLYELGTSNNNNNSMRSILERYQKCSQTAKHMNFSNNTSDEKMKQEINLLKQQIGSAKLTN

SEQ ID NO: 2274 - protein, 97 aa, Pinus radiata
SWKANPCTVPSSRIGGFGGGQVILPLAHTVEHEEFLEVIKLENHGLTQEEALLSRDMFLLQLCSGLDENAVGACAELVFAPIDASLADSSPLLPSGF

SEQ ID NO: 2275 - protein, 157 aa, Pinus radiata
SVDVLTAFSTGNGGTIELLYMQMYAPTTLASARDFWTLRYTSVLEDGSLVVCERSLSGTQGGPSMPAVQQFVRAEMQPSGYLIRPCEGGGSLIHIVDHMDLEPWSVPEVLRPLYESSTVLAQKVTMSALRHLRQIAQEASSDVVLGWGRQPAALRTF

SEQ ID NO: 2276 - protein, 327 aa, Pinus radiata
MVSVNPNPAQGFYFFDPANTRIHGVNAGSAAEGGGAAPPYAEDPSKKVRKPYTITKSRESWTEQEHDKFLEALHLFDRDWKKIEAFVGSKTVIQIRSHAQKYFLKVQKNGTSEHVPPPRPKRKAAHPYPQKAPKAPVVSQVNGPFQVSSAFLEPGHIVRPDGSALLGNSRTSVALSSWSHNSVPAMSASQGTKDVGISGPPVPSNCCNSSSNDSTPRSWPNAQAIEPLDQQKHLRVMPDFAQVYRFIGSVFDPDAGGHLQRLKQMDPINLETVVLLMKNLSANLTSPEFEKYQHGLFASYEGGPEKSKSGGSFKLLPEKSGSLILSA

SEQ ID NO: 2277 - protein, 225 aa, Pinus radiata
MGRSPCCEKAHTNKGAWTKQEDDRLIAHIRAHGEGGWRSLPKAAGLLRCGKSCRLRWINYLRPDLKRGSFTEEEDELIIKLHSFVGNKWSLIAGRLPGRTDNEIKNYWNTHIKRKLLSKGLDPQTHRPLGQPNNTPVTRPVLEHEIPAFQNPATPEIADLLQHHRLESSPIKPAASDAEEHPDLNLNLCISLPSNSAPAVNRVSSVDTTVDSNSNSGDGLCWQFL

SEQ ID NO: 2278 - protein, 69 aa, Pinus radiata
MLLQNVPPALLVRFLREHRSEWADCNIDAYSSATMKANAYNVPGSLGGITGSQVILPLAHTVEHEEFLE

SEQ ID NO: 2279 - protein, 65 aa, Pinus radiata
MARFPRVDKSNSKKTVKKGAWSAEEDQKLVAYIKRYGIWNWTHMAEPAGLARTGKSCRLRWMNYL

SEQ ID NO: 2280 - protein, 39 aa, Pinus radiata
PNIKHGNITQEEEEIIINLHRVLGNRWASIASRLSGRTD

SEQ ID NO: 2281 - protein, 59 aa, Pinus radiata
RKPCCDKQDTNKGAWSKQEDQKLIDYIRKHGEGCWRTLPKAAGLLRCGKSCRLRWINYL

SEQ ID NO: 2282 - protein, 48 aa, Pinus radiata
PDLKRGNFAEDEEDLIIKLHALLGNRWSLIAGRLPGRTDNEVKNYWNS

SEQ ID NO: 2283 - protein, 19 aa, Pinus radiata
CCSKKAVKRGFWSPEEDLK

SEQ ID NO: 2284 - protein, 45 aa, Pinus radiata
WTREEDNLLIHSITCHGEGRWNMLAKSAGLKRTGKSCRLRWLNYL

SEQ ID NO: 2285 - protein, 57 aa, Pinus radiata
RPDIKRGNLTPQEQLMILELHHKWGNRWSKIAQYLPGRTDNEIKNYWRTRVQKQARQ

SEQ ID NO: 2286 - protein, 57 aa, Pinus radiata
MASRKEVDRIKGPWSPEEDEALRLLVQKHGPRNWSLISKSIPGRSGKSCRLRWCNQL

SEQ ID NO: 2287 - protein, 68 aa, Pinus radiata
SPQVEHRAFTPEEDDIIVRAHARFGNKWATIARLLSGRTDNAIKNHWNSTLKRKCSPPLSPLAEEGNN

SEQ ID NO: 2288 - protein, 61 aa, Pinus radiata
MGRHSCCYKQKLRKGLWSPEEDEKLLRYITQYGHGCWSSVPKLAGLQRCGKSCRLRWINYL

SEQ ID NO: 2289 - protein, 78 aa, Pinus radiata
GSSPIDGSDGYLSDDPAPGSRSSNRRVERKKGNPWTEEEHRRFLIGLQKLGKGDWRGIARDFVTTRTPTQVASHAQKY

SEQ ID NO: 2290 - protein, 53 aa, Pinus radiata
KKGNPWTEEEHRRFLIGLQKLGKGDWRGIARDFVTTRTPTQVASHAQKYYIRQ

SEQ ID NO: 2291 - protein, 59 aa, Pinus radiata
RKPCCDKRDTNKGAWSKQEDQKLIDYIQKHGEGSWRTLPQAAGLLRCGKSCRLRWINYL

SEQ ID NO: 2292 - protein, 65 aa, Pinus radiata
PDLKRGNFAEDEEDLIIKLHALLGNRWSLIAGRLPGRTDNEVKNYWNSHLRRKLLKMGIDPNNHR

SEQ ID NO: 2293 - protein, 54 aa, Pinus radiata
MGRSPCCEKAHTNKGAWTKEEDQRLIDYIRLHGEGCWRSLPKSAGLLRCGKSCR

SEQ ID NO: 2294 - protein, 65 aa, Pinus radiata; identical to SEQ ID NO: 2279

SEQ ID NO: 2295 - protein, 40 aa, Pinus radiata
RPNIKHGNITQEEEEIIINLHRVLGNRWASIASRLSGRTD

SEQ ID NO: 2296 - protein, 41 aa, Pinus radiata
RKGVPWTEEEHRTFLMGLEKMGKGDWRGISRNYVTTRTPTQ

SEQ ID NO: 2297 - protein, 31 aa, Pinus radiata
RKGVPWTEEEHRTFLMGLEKMGKGDWRGISR

SEQ ID NO: 2298 - protein, 44 aa, Pinus radiata
EVRKGPWTEQEDFQLVCFVGLFGDRRWDFIAKVSGLKVAGENNR

SEQ ID NO: 2299 - protein, 61 aa, Pinus radiata
MGRSPCCESEHMNKGAWSKEEDERLIAYIKRHGEGCWRSLPKAAGLLRCGKSCRLRWINYL

SEQ ID NO: 2300 - protein, 67 aa, Pinus radiata
PDLKRGNFSDEEDELIITLHSLLGNKWSLIAARLPGRTDNEIKNYWNTHIKRKLHARGIDPQTHRPL

SEQ ID NO: 2301 - protein, 50 aa, Pinus radiata
KRGVPWTEEEHRLFLLGLQKVGKGDWRAISRNFVKTRTPTQVASHAQKYF

SEQ ID NO: 2302 - protein, 53 aa, Pinus radiata
KRGVPWTEEEHRLFLLGLQKVGKGDWRAISRNFVKTRTPTQVASHAQKYFLRR

SEQ ID NO: 2303 - protein, 64 aa, Pinus radiata
MASSSSVASARKDADRIKGPWSPEEDEALQRLVQSYGPRNWSLISKSIPGRSGKSCRLRWCNQL

SEQ ID NO: 2304 - protein, 98 aa, Pinus radiata
SPQVEHRPFTPEEDEAIVRAHARFGNKWATIARLLNGRTDNAVKNHWNSTLKRKCSSTCSAGGDDADALAEQQPLKRSASLGTPTGGNNAVSDLFFSP

SEQ ID NO: 2305 - protein, 50 aa, Pinus radiata
LRKGLWSPEEDDKLMNYMLNNGQGCWSDVARNAGLQRCGKSCRLRWINYL

SEQ ID NO: 2306 - protein, 60 aa, Pinus radiata
PDLKRGAFSPQEEELIIHLHSILGNRWSQIAARLPGRTDNEIKNFWNSTIKKRSRTRHHL

SEQ ID NO: 2307 - protein, 44 aa, Pinus radiata
KLDFSEDEETLVIRMYNLVGERWSLIAGRIPGRTAEEIEKYWNS

SEQ ID NO: 2308 - protein, 61 aa, Pinus radiata
MGRQPCCDKLGVKKGPWTAEEDRKLVNFILTHGQCCWRAVPKLAGLRRCGKSCRLRWTNYL

SEQ ID NO: 2309 - protein, 64 aa, Pinus radiata
PDLKRGLLNEAEESLVIDLHATLGNRWSKIAARLPGRTDNEIKNHWNTHIKKKLIRMGIDPVTH

SEQ ID NO: 2310 - protein, 61 aa, Pinus radiata
MGRQPCCDKSGVKKGPWTAEEDKKLINFILTNGHCCWRAVPKLAGLRRCGKSCRLRWTNYL

SEQ ID NO: 2311 - protein, 67 aa, Pinus radiata
PDLKRGLLSEAEEQLVIDLHARLGNRWSKIAARLPGRTDNEIKNHWNTHIKKKLLKMGIDPVTHEPL

SEQ ID NO: 2312 - protein, 50 aa, Pinus radiata
KKGVPWSEEEHRMFLYGLEKLGKGDWRGISRNFVTTRTPTQVASHAQKYF

SEQ ID NO: 2313 - protein, 53 aa, Pinus radiata
KKGVPWSEEEHRMFLYGLEKLGKGDWRGISRNFVTTRTPTQVASHAQKYFLRQ

SEQ ID NO: 2314 - protein, 60 aa, Pinus radiata
GKSPGHDEPDRIKGPWSPEEDAALQHFVQKYGPRNWSLISKAIPGRSGKSCRLRWCNQLS

SEQ ID NO: 2315 - protein, 60 aa, Pinus radiata
PQVEHRPFTPEEDATIVRAHAQHGNKWATIARMLSGRTDNAIKNHWNSTLRRRCQGGGAL

SEQ ID NO: 2316 - protein, 20 aa, Pinus radiata
KRGVPWTEEEHRMFLVGLQR

SEQ ID NO: 2317 - protein, 18 aa, Pinus radiata
KRGVPWTEEEHRMFLVGL

SEQ ID NO: 2318 - protein, 10 aa, Pinus radiata
KRGVPWTEEE

SEQ ID NO: 2319 - protein, 14 aa, Pinus radiata
KRGVPWTEEEHRMF

SEQ ID NO: 2320 - protein, 68 aa, Pinus radiata
MRCTRWQGLPFSSKPKVKKGLWSPEEDEKLINYMMKNGLLGCSWSYVAKQIGLQRCGKSCRLRWTNYL

SEQ ID NO: 2321 - protein, 62 aa, Pinus radiata
MGRAPCCDKANVKKGPWSPEEDTKLKAFIEQHGTGGNWIALPQKAGLKRCGKSCRLRWLNYL

SEQ ID NO: 2322 - protein, 60 aa, Pinus radiata
MGRSPCCEKAHTNKGAWTKEEDDRLIAHIRTHGEGCWRSLPKAAGLMRCGKSCRLRWINY

SEQ ID NO: 2323 - protein, 46 aa, Pinus radiata
RPDLKRGNFSEEEDELIIKLHSLLGNKWSLIAGRLPGRTDNEIKNY

SEQ ID NO: 2324 - protein, 61 aa, Pinus radiata
MGRAPCCEKVGLKKGPWTPEEDQKLLAYIQEHGHGSWRALPQKAGLLRCGKSCRLRWTNYL

SEQ ID NO: 2325 - protein, 61 aa, Pinus radiata
MGRSPCCEKAHTNKGAWTKEEDDRLIAHIRTHGEGCWRSLPKAAGLMRCGKSCRLRWINYL

SEQ ID NO: 2326 - protein, 45 aa, Pinus radiata
PDLKRGNFSEEEDELVIKLHSLLGNKWSLIAGRLPGRTDNEIKNY

SEQ ID NO: 2327 - protein, 50 aa, Pinus radiata
KKGVPWTEEEHRMFLLGLQKLGKGDWRGIARNFVITRTPTQVASHAQKYF

SEQ ID NO: 2328 - protein, 53 aa, Pinus radiata
KKGVPWTEEEHRMFLLGLQKLGKGDWRGIARNFVITRTPTQVASHAQKYFIRQ

SEQ ID NO: 2329 - protein, 48 aa, Pinus radiata
QRERWSEDEHLKFLEALKMYGRAWRRIEEHIGTKTAVQIRSHAQKFFS

SEQ ID NO: 2330 - protein, 42 aa, Pinus radiata
QRERWSEDEHLKFLEALKMYGRAWRRIEEHIGTKTAVQIRSH

SEQ ID NO: 2331 - protein, 61 aa, Pinus radiata
MGRTPCCLKVGLNRGPWTPEEDLCLSNYIEAHGEGGWRTLPKKAGLLRCGKSCRLRWMNYL

SEQ ID NO: 2332 - protein, 67 aa, Pinus radiata
PDVKHGHILPEEEDLILRLHRLLGNRWSLIAGRMPGRTDNEVKNYWNTHLSKKLISQGIDPRTHKPL

SEQ ID NO: 2333 - protein, 55 aa, Pinus radiata
CEDLDRIKGPWSPEEDASLQRLVQKYGPRNWTLISKGIPGRSGKSCRLRWCNQLS

SEQ ID NO: 2334 - protein, 56 aa, Pinus radiata
KGPWSPEEDASLQRLVQKYGPRNWTLISKGIPGRSGKSCRLRWCNQLSPQVEHRPF

SEQ ID NO: 2335 - protein, 34 aa, Pinus radiata
MGAPKQKWTSEEEGALRAGVEKYGAGKWQTILKD

SEQ ID NO: 2336 - protein, 51 aa, Pinus radiata
LRKGLWSPDEDIELTTYIMRKGLMGCWNYIAKQAGLQRCGKSCRLRWINYL

SEQ ID NO: 2337 - protein, 45 aa, Pinus radiata
PGLKRCAISPQEERLIIQLQSSLGNRWSQIAAHLPGRTDNEVKNY

SEQ ID NO: 2338 - protein, 62 aa, Pinus radiata
MGRSPCCEKAHTNKGAWTQQEDTRLVAHIRAHGQGGWSSLPKAAGLLRCGKSCRQRWINYLH

SEQ ID NO: 2339 - protein, 39 aa, Pinus radiata
PDLKRSNFSEEEDELIVRLHSLLGNKWSLIAGRLPGRTD

SEQ ID NO: 2340 - protein, 61 aa, Pinus radiata
GTHPAPSKPKLRKGLWSPVEDNQLTNYILRRGLVGCWNYVAKQAGLQRTGKSCRLRWINYL

SEQ ID NO: 2341 - protein, 43 aa, Pinus radiata
PGLKRHPISRQEEQLIIELQSILGNRWSQIAAQLPGRTDIEIK

SEQ ID NO: 2342 - protein, 61 aa, Pinus radiata
MGRHSCCYKQKLRKGLWSPEEDEKLLRHISQYGHGCWSSVPKQAGLQRCGKSCRLRWINYL

SEQ ID NO: 2343 - protein, 67 aa, Pinus radiata
PDLKRGAFSQDEEDLIIELHAALGNKWSQIAANLPGRTDNEIKNLWNSCLKKKLRQRGIDPVSHRPL

SEQ ID NO: 2344 - protein, 58 aa, Pinus radiata
TPCCSKVGIKRGPWTPEEDEVLASYVRREGEGRWRTLPKRAGLQRCGKSCRLRWMNYL

SEQ ID NO: 2345 - protein, 67 aa, Pinus radiata
PSVKRGQIAPDEEDLILRLHRLLGNRWSLIAGRIPGRTDNEIKNYWNTHLSKKLISQGIDPRTHKPL

SEQ ID NO: 2346 - protein, 67 aa, Pinus radiata
MDKKPDDDSGKSQDVEVRKGPWTMEEDLILINYIANHGEGSWNSLAKAAGLKRTGKSCRLRWLNYLR

SEQ ID NO: 2347 - protein, 56 aa, Pinus radiata
PDVRRGNITTEEQLLIMELHAKWGNRWSKIAKHLPGRTDNEIKNFWRTRIQKHIKQ

SEQ ID NO: 2348 - protein, 63 aa, Pinus radiata
MDKKPCYRTQDPQVRKGPWTLEEDLILMDYIANHGEGVWNSLAKAAGLQRTGKSCRLRWLNYL

SEQ ID NO: 2349 - protein, 54 aa, Pinus radiata
PDVRRGNITPEEQLLIIHLQSMWGNRWSEIAKHLPGRTDNEIKNYWRTKIQKHI

SEQ ID NO: 2350 - protein, 47 aa, Pinus radiata
SRESWTEQEHDKFLEALHLFDRDWKKIEAFVGSKTVIQIRSHAQKYF

SEQ ID NO: 2351 - protein, 59 aa, Pinus radiata
SWTEQEHDKFLEALHLFDRDWKKIEAFVGSKTVIQIRSHAQKYFLKVQKNGTSEHVPPP

SEQ ID NO: 2352 - protein, 45 aa, Pinus radiata
MGRSPCCEKAHTNKGAWTKQEDDRLIAHIRAHGEGGWRSLPKAAG

SEQ ID NO: 2353 - protein, 45 aa, Pinus radiata
MGRAPCCEKVGLKKGPWTPEEDQKLVTYIQEHGHGSWRALPQKAG

SEQ ID NO: 2354 - protein, 61 aa, Pinus radiata
MGRSPCCAKEGLNRGAWTKTEDIILSEYIRIHGDGGWRSLPKKAGLKRCGKSCRLRWLNYL

SEQ ID NO: 2355 - protein, 61 aa, Pinus radiata
MGRAPCCSNDDRNKGAWTKEEDDRLIQYIKVHGEGCWRSLPKAAGLLRCGKSCRLRWINYL

SEQ ID NO: 2356 - protein, 68 aa, Pinus radiata
PDLKRGFFSEDEDDLILKLHALLGNNRWSLIAGRLPGRTDNEIKNYWNSHLKRKLISMGIDPLTHRPF

SEQ ID NO: 2357 - protein, 61 aa, Pinus radiata
MGRAPCCSNGDRNKGAWTKEEDDRLIQYIKVHGEGCWRSLPNAAGLLRCGKSCRLRWINYL

SEQ ID NO: 2358 - protein, 39 aa, Pinus radiata
PDLKRGFFSEDEDDLILKLHALLGNKWSLIAGRLPGRTD

SEQ ID NO: 2359 - protein, 62 aa, Pinus radiata
MGRTPCCEKNIGLKKGPWTPEEDQKLIDYIQSHGHGSWRALPKRAGLLRCGKSCRLRWTNYL

SEQ ID NO: 2360 - protein, 66 aa, Pinus radiata
PDIKRGQFSFEEEQTIIELHAVLGNKWSTIAGHLPGRTDNEIKNYWNTHLKKRLLQMGIDPVTHRP

SEQ ID NO: 2361 - protein, 61 aa, Pinus radiata; identical to SEQ ID NO: 2331

SEQ ID NO: 2362 - protein, 67 aa, Pinus radiata; identical to SEQ ID NO: 2332

SEQ ID NO: 2363 - protein, 61 aa, Pinus radiata
MGRSPCCEKAHTNKGAWTKQEDDRLIAHIRAHGEGGWRSLPKAAGLLRCGKSCRLRWINYL

SEQ ID NO: 2364 - protein, 67 aa, Pinus radiata
PDLKRGSFTEEEDELIIKLHSFVGNKWSLIAGRLPGRTDNEIKNYWNTHIKRKLLSKGLDPQTHRPL

SEQ ID NO: 2365 - protein, 61 aa, Pinus radiata; identical to SEQ ID NO: 2363

SEQ ID NO: 2366 - protein, 67 aa, Pinus radiata; identical to SEQ ID NO: 2364

SEQ ID NO: 2367 - protein, 61 aa, Pinus radiata; identical to SEQ ID NO: 2325

SEQ ID NO: 2368 - protein, 67 aa, Pinus radiata
PDLKRGNFSEEEDELVIKLHSLLGNKWSLIAGRLPGRTDNEIKNYWNTHIKRKLLNRGLDPQSHRPL

SEQ ID NO: 2369 - DNA, 37 bp, Artificial Sequence
  Made in a lab
cgtctgtctagaaacaagctgaacatggacaagaagc

SEQ ID NO: 2370 - DNA, 31 bp, Artificial Sequence
  Made in a lab
tggccttctagactagctctgaccagagaaa
